United States Patent Application Publication US 2024/0309344 A1 - sequence listing, part 2

SEQ ID NO: 14623 - RNA, 20 nt, synthetic construct
  misc_feature 1..20: note = C9Orf72 GTCN PAM targeting sequence
  source 1..20: mol_type = other RNA
ttagaacagctagaggctaa

SEQ ID NO: 14624 - RNA, 20 nt, synthetic construct
  misc_feature 1..20: note = C9Orf72 GTCN PAM targeting sequence
  source 1..20: mol_type = other RNA
tcttgtctactgctcagcag

SEQ ID NO: 14625 - RNA, 20 nt, synthetic construct
  misc_feature 1..20: note = C9Orf72 GTCN PAM targeting sequence
  source 1..20: mol_type = other RNA
actgctcagcagagtctctg

SEQ ID NO: 14626 - RNA, 20 nt, synthetic construct
  misc_feature 1..20: note = C9Orf72 GTCN PAM targeting sequence
  source 1..20: mol_type = other RNA
ctgtagaaatgaatagataa

SEQ ID NO: 14627 - RNA, 20 nt, synthetic construct
  misc_feature 1..20: note = C9Orf72 GTCN PAM targeting sequence
  source 1..20: mol_type = other RNA
ttgtttctttctcttctctt

SEQ ID NO: 14628 - RNA, 20 nt, synthetic construct
  misc_feature 1..20: note = C9Orf72 GTCN PAM targeting sequence
  source 1..20: mol_type = other RNA
cagaagaataattcttcttt

SEQ ID NO: 14629 - RNA, 20 nt, synthetic construct
  misc_feature 1..20: note = C9Orf72 GTCN PAM targeting sequence
  source 1..20: mol_type = other RNA
ttttgttttcctgtgttctt

SEQ ID NO: 14630 - RNA, 20 nt, synthetic construct
  misc_feature 1..20: note = C9Orf72 GTCN PAM targeting sequence
  source 1..20: mol_type = other RNA
gagcaggagtgagaagcaat

SEQ ID NO: 14631 - RNA, 20 nt, synthetic construct
  misc_feature 1..20: note = C9Orf72 GTCN PAM targeting sequence
  source 1..20: mol_type = other RNA
gcatgagaagtcaaaaggaa

SEQ ID NO: 14632 - RNA, 20 nt, synthetic construct
  misc_feature 1..20: note = C9Orf72 GTCN PAM targeting sequence
  source 1..20: mol_type = other RNA
aaaggaaagcatacacacta

SEQ ID NO: 14633 - RNA, 20 nt, synthetic construct
  misc_feature 1..20: note = C9Orf72 GTCN PAM targeting sequence
  source 1..20: mol_type = other RNA
ctaagaccccaacccccaag

SEQ ID NO: 14634 - RNA, 20 nt, synthetic construct
  misc_feature 1..20: note = C9Orf72 GTCN PAM targeting sequence
  source 1..20: mol_type = other RNA
tagagacccttttccacgcc

SEQ ID NO: 14635 - RNA, 20 nt, synthetic construct
  misc_feature 1..20: note = C9Orf72 GTCN PAM targeting sequence
  source 1..20: mol_type = other RNA
ccatctccttcttgggggtt

SEQ ID NO: 14636 - RNA, 20 nt, synthetic construct
  misc_feature 1..20: note = C9Orf72 GTCN PAM targeting sequence
  source 1..20: mol_type = other RNA
tcagtttgaggctcatagct

SEQ ID NO: 14637 - RNA, 20 nt, synthetic construct
  misc_feature 1..20: note = C9Orf72 GTCN PAM targeting sequence
  source 1..20: mol_type = other RNA
gttatttggaaaggccgttt

SEQ ID NO: 14638 - RNA, 20 nt, synthetic construct
  misc_feature 1..20: note = C9Orf72 GTCN PAM targeting sequence
  source 1..20: mol_type = other RNA
tgagctcctcaatctctcag

SEQ ID NO: 14639 - RNA, 20 nt, synthetic construct
  misc_feature 1..20: note = C9Orf72 GTCN PAM targeting sequence
  source 1..20: mol_type = other RNA
cttcttttagaaacaatggt

SEQ ID NO: 14640 - RNA, 20 nt, synthetic construct
  misc_feature 1..20: note = C9Orf72 GTCN PAM targeting sequence
  source 1..20: mol_type = other RNA
acctttttacactactacat

SEQ ID NO: 14641 - RNA, 20 nt, synthetic construct
  misc_feature 1..20: note = C9Orf72 GTCN PAM targeting sequence
  source 1..20: mol_type = other RNA
ctctgggcgtatgtagtagt

SEQ ID NO: 14642 - RNA, 20 nt, synthetic construct
  misc_feature 1..20: note = C9Orf72 GTCN PAM targeting sequence
  source 1..20: mol_type = other RNA
ctggtgatcttcaacatctc

SEQ ID NO: 14643 - RNA, 20 nt, synthetic construct
  misc_feature 1..20: note = C9Orf72 GTCN PAM targeting sequence
  source 1..20: mol_type = other RNA
tgtctgttattagggaatcc

SEQ ID NO: 14644 - RNA, 20 nt, synthetic construct
  misc_feature 1..20: note = C9Orf72 GTCN PAM targeting sequence
  source 1..20: mol_type = other RNA
gttattagggaatccaaaag

SEQ ID NO: 14645 - RNA, 20 nt, synthetic construct
  misc_feature 1..20: note = C9Orf72 GTCN PAM targeting sequence
  source 1..20: mol_type = other RNA
tcatccaagtagatgcagtg

SEQ ID NO: 14646 - RNA, 20 nt, synthetic construct
  misc_feature 1..20: note = C9Orf72 GTCN PAM targeting sequence
  source 1..20: mol_type = other RNA
ggcattatgtttccttaaaa

SEQ ID NO: 14647 - RNA, 20 nt, synthetic construct
  misc_feature 1..20: note = C9Orf72 GTCN PAM targeting sequence
  source 1..20: mol_type = other RNA
gccttttgtggggtttggtt

SEQ ID NO: 14648 - RNA, 20 nt, synthetic construct
  misc_feature 1..20: note = C9Orf72 GTCN PAM targeting sequence
  source 1..20: mol_type = other RNA
gggtaggtgtgttcttctaa

SEQ ID NO: 14649 - RNA, 20 nt, synthetic construct
  misc_feature 1..20: note = C9Orf72 GTCN PAM targeting sequence
  source 1..20: mol_type = other RNA
agttgaaatgtgttgacctt

SEQ ID NO: 14650 - RNA, 20 nt, synthetic construct
  misc_feature 1..20: note = C9Orf72 GTCN PAM targeting sequence
  source 1..20: mol_type = other RNA
acacatttcaactagactac

SEQ ID NO: 14651 - RNA, 20 nt, synthetic construct
  misc_feature 1..20: note = C9Orf72 GTCN PAM targeting sequence
  source 1..20: mol_type = other RNA
aggtcaacacatttcaacta

SEQ ID NO: 14652 - RNA, 20 nt, synthetic construct
  misc_feature 1..20: note = C9Orf72 GTCN PAM targeting sequence
  source 1..20: mol_type = other RNA
gctgagcagttctgccgata

SEQ ID NO: 14653 - RNA, 20 nt, synthetic construct
  misc_feature 1..20: note = C9Orf72 GTCN PAM targeting sequence
  source 1..20: mol_type = other RNA
atgggtcagctgagcagttc

SEQ ID NO: 14654 - RNA, 20 nt, synthetic construct
  misc_feature 1..20: note = C9Orf72 GTCN PAM targeting sequence
  source 1..20: mol_type = other RNA
acttacgggccaggcactct

SEQ ID NO: 14655 - RNA, 20 nt, synthetic construct
  misc_feature 1..20: note = C9Orf72 GTCN PAM targeting sequence
  source 1..20: mol_type = other RNA
aacatttattgagtgtctac

SEQ ID NO: 14656 - RNA, 20 nt, synthetic construct
  misc_feature 1..20: note = C9Orf72 GTCN PAM targeting sequence
  source 1..20: mol_type = other RNA
caacatatttaattaagccc

SEQ ID NO: 14657 - RNA, 20 nt, synthetic construct
  misc_feature 1..20: note = C9Orf72 GTCN PAM targeting sequence
  source 1..20: mol_type = other RNA
gtgtattatattacatatca

SEQ ID NO: 14658 - RNA, 20 nt, synthetic construct
  misc_feature 1..20: note = C9Orf72 GTCN PAM targeting sequence
  source 1..20: mol_type = other RNA
acatcttggtatatgtactt

SEQ ID NO: 14659 - RNA, 20 nt, synthetic construct
  misc_feature 1..20: note = C9Orf72 GTCN PAM targeting sequence
  source 1..20: mol_type = other RNA
tcaaataaaataaagaagta

SEQ ID NO: 14660 - RNA, 20 nt, synthetic construct
  misc_feature 1..20: note = C9Orf72 GTCN PAM targeting sequence
  source 1..20: mol_type = other RNA
aggacacatggggtgagcta

SEQ ID NO: 14661 - RNA, 20 nt, synthetic construct
  misc_feature 1..20: note = C9Orf72 GTCN PAM targeting sequence
  source 1..20: mol_type = other RNA
tggactcaggaaaagagtat

SEQ ID NO: 14662 - RNA, 20 nt, synthetic construct
  misc_feature 1..20: note = C9Orf72 GTCN PAM targeting sequence
  source 1..20: mol_type = other RNA
tatcagggtagctcacccca

SEQ ID NO: 14663 - RNA, 20 nt, synthetic construct
  misc_feature 1..20: note = C9Orf72 GTCN PAM targeting sequence
  source 1..20: mol_type = other RNA
aacaaagcctgcctctgttg

SEQ ID NO: 14664 - RNA, 20 nt, synthetic construct
  misc_feature 1..20: note = C9Orf72 GTCN PAM targeting sequence
  source 1..20: mol_type = other RNA
tggaacaatggctcagtaca

SEQ ID NO: 14665 - RNA, 20 nt, synthetic construct
  misc_feature 1..20: note = C9Orf72 GTCN PAM targeting sequence
  source 1..20: mol_type = other RNA
gaagtggcaaatggattctc

SEQ ID NO: 14666 - RNA, 20 nt, synthetic construct
  misc_feature 1..20: note = C9Orf72 GTCN PAM targeting sequence
  source 1..20: mol_type = other RNA
caccacatttaggaggagag

SEQ ID NO: 14667 - RNA, 20 nt, synthetic construct
  misc_feature 1..20: note = C9Orf72 GTCN PAM targeting sequence
  source 1..20: mol_type = other RNA
tggcaagtgtgccgttactt

SEQ ID NO: 14668 - RNA, 20 nt, synthetic construct
  misc_feature 1..20: note = C9Orf72 GTCN PAM targeting sequence
  source 1..20: mol_type = other RNA
gctttctgtatcactgcctc

SEQ ID NO: 14669 - RNA, 20 nt, synthetic construct
  misc_feature 1..20: note = C9Orf72 GTCN PAM targeting sequence
  source 1..20: mol_type = other RNA
tggtgaagagtgcctggcca

SEQ ID NO: 14670 - RNA, 20 nt, synthetic construct
  misc_feature 1..20: note = C9Orf72 GTCN PAM targeting sequence
  source 1..20: mol_type = other RNA
atgtataaattctcagagaa

SEQ ID NO: 14671 - RNA, 20 nt, synthetic construct
  misc_feature 1..20: note = C9Orf72 GTCN PAM targeting sequence
  source 1..20: mol_type = other RNA
gcaagcaaggatgatataag

SEQ ID NO: 14672 - RNA, 20 nt, synthetic construct
  misc_feature 1..20: note = C9Orf72 GTCN PAM targeting sequence
  source 1..20: mol_type = other RNA
tttctttttcccattttaca

SEQ ID NO: 14673 - RNA, 20 nt, synthetic construct
  misc_feature 1..20: note = C9Orf72 GTCN PAM targeting sequence
  source 1..20: mol_type = other RNA
tcaactctttcttttggtgt

SEQ ID NO: 14674 - RNA, 20 nt, synthetic construct
  misc_feature 1..20: note = C9Orf72 GTCN PAM targeting sequence
  source 1..20: mol_type = other RNA
cttttgctttagtttgaggt

SEQ ID NO: 14675 - RNA, 20 nt, synthetic construct
  misc_feature 1..20: note = C9Orf72 GTCN PAM targeting sequence
  source 1..20: mol_type = other RNA
cttgccacagaaactaggag

SEQ ID NO: 14676 - RNA, 20 nt, synthetic construct
  misc_feature 1..20: note = C9Orf72 GTCN PAM targeting sequence
  source 1..20: mol_type = other RNA
gtgctgcagtgagagagggc

SEQ ID NO: 14677 - RNA, 20 nt, synthetic construct
  misc_feature 1..20: note = C9Orf72 GTCN PAM targeting sequence
  source 1..20: mol_type = other RNA
tcagggacaaccaataaagc

SEQ ID NO: 14678 - RNA, 20 nt, synthetic construct
  misc_feature 1..20: note = C9Orf72 GTCN PAM targeting sequence
  source 1..20: mol_type = other RNA
ctgaggactttagccctctc

SEQ ID NO: 14679 - RNA, 20 nt, synthetic construct
  misc_feature 1..20: note = C9Orf72 GTCN PAM targeting sequence
  source 1..20: mol_type = other RNA
ataacctgtaggcagctcag

SEQ ID NO: 14680 - RNA, 20 nt, synthetic construct
  misc_feature 1..20: note = C9Orf72 GTCN PAM targeting sequence
  source 1..20: mol_type = other RNA
ttaagtgttaaagtacattt

SEQ ID NO: 14681 - RNA, 20 nt, synthetic construct
  misc_feature 1..20: note = C9Orf72 GTCN PAM targeting sequence
  source 1..20: mol_type = other RNA
caaatgtactttaacactta

SEQ ID NO: 14682 - RNA, 20 nt, synthetic construct
  misc_feature 1..20: note = C9Orf72 GTCN PAM targeting sequence
  source 1..20: mol_type = other RNA
taacccatagtaggtgctca

SEQ ID NO: 14683 - RNA, 20 nt, synthetic construct
  misc_feature 1..20: note = C9Orf72 GTCN PAM targeting sequence
  source 1..20: mol_type = other RNA
agcacaggtcctaacccata

SEQ ID NO: 14684 - RNA, 20 nt, synthetic construct
  misc_feature 1..20: note = C9Orf72 GTCN PAM targeting sequence
  source 1..20: mol_type = other RNA
tgattgagagcaccgaagaa

SEQ ID NO: 14685 - RNA, 20 nt, synthetic construct
  misc_feature 1..20: note = C9Orf72 GTCN PAM targeting sequence
  source 1..20: mol_type = other RNA
actgcaccagctataactcc

SEQ ID NO: 14686 - RNA, 20 nt, synthetic construct
  misc_feature 1..20: note = C9Orf72 GTCN PAM targeting sequence
  source 1..20: mol_type = other RNA
catctcttgacacatctctg

SEQ ID NO: 14687 - RNA, 20 nt, synthetic construct
  misc_feature 1..20: note = C9Orf72 GTCN PAM targeting sequence
  source 1..20: mol_type = other RNA
agagatgtgacacagggcat

SEQ ID NO: 14688 - RNA, 20 nt, synthetic construct
  misc_feature 1..20: note = C9Orf72 GTCN PAM targeting sequence
  source 1..20: mol_type = other RNA
ttatttcactatctgccccg

SEQ ID NO: 14689 - RNA, 20 nt, synthetic construct
  misc_feature 1..20: note = C9Orf72 GTCN PAM targeting sequence
  source 1..20: mol_type = other RNA
cggggcagatagtgaaataa

SEQ ID NO: 14690 - RNA, 20 nt, synthetic construct
  misc_feature 1..20: note = C9Orf72 GTCN PAM targeting sequence
  source 1..20: mol_type = other RNA
gtgctgcagcgagggagggc

SEQ ID NO: 14691 - RNA, 20 nt, synthetic construct
  misc_feature 1..20: note = C9Orf72 GTCN PAM targeting sequence
  source 1..20: mol_type = other RNA
atgagaactttagccctccc

SEQ ID NO: 14692 - RNA, 20 nt, synthetic construct
  misc_feature 1..20: note = C9Orf72 GTCN PAM targeting sequence
  source 1..20: mol_type = other RNA
atataaggatgaatttggca

SEQ ID NO: 14693 - RNA, 20 nt, synthetic construct
  misc_feature 1..20: note = C9Orf72 GTCN PAM targeting sequence
  source 1..20: mol_type = other RNA
gcctgcaacacgaaggagga

SEQ ID NO: 14694 - RNA, 20 nt, synthetic construct
  misc_feature 1..20: note = C9Orf72 GTCN PAM targeting sequence
  source 1..20: mol_type = other RNA
ttgtctcaggctctgatagt

SEQ ID NO: 14695 - RNA, 20 nt, synthetic construct
  misc_feature 1..20: note = C9Orf72 GTCN PAM targeting sequence
  source 1..20: mol_type = other RNA
caggctctgatagtgtggga

SEQ ID NO: 14696 - RNA, 20 nt, synthetic construct
  misc_feature 1..20: note = C9Orf72 GTCN PAM targeting sequence
  source 1..20: mol_type = other RNA
tcatttccagtttggaatcc

SEQ ID NO: 14697 - RNA, 20 nt, synthetic construct
  misc_feature 1..20: note = C9Orf72 GTCN PAM targeting sequence
  source 1..20: mol_type = other RNA
gtacacaagatggtcttcat

SEQ ID NO: 14698 - RNA, 20 nt, synthetic construct
  misc_feature 1..20: note = C9Orf72 GTCN PAM targeting sequence
  source 1..20: mol_type = other RNA
gtaataaaataagctcagct

SEQ ID NO: 14699 - RNA, 20 nt, synthetic construct
  misc_feature 1..20: note = C9Orf72 GTCN PAM targeting sequence
  source 1..20: mol_type = other RNA
cttacatagaaccccctttg

SEQ ID NO: 14700 - RNA, 20 nt, synthetic construct
  misc_feature 1..20: note = C9Orf72 GTCN PAM targeting sequence
  source 1..20: mol_type = other RNA
ataacttaaacatgcctgga

SEQ ID NO: 14701 - RNA, 20 nt, synthetic construct
  misc_feature 1..20: note = C9Orf72 GTCN PAM targeting sequence
  source 1..20: mol_type = other RNA
attgaaaatttactcagaag

SEQ ID NO: 14702 - RNA, 20 nt, synthetic construct
  misc_feature 1..20: note = C9Orf72 GTCN PAM targeting sequence
  source 1..20: mol_type = other RNA
tgatctgccccctggggaat

SEQ ID NO: 14703 - RNA, 20 nt, synthetic construct
  misc_feature 1..20: note = C9Orf72 GTCN PAM targeting sequence
  source 1..20: mol_type = other RNA
ctgcagttaataaccttttt

SEQ ID NO: 14704 - RNA, 20 nt, synthetic construct
  misc_feature 1..20: note = C9Orf72 GTCN PAM targeting sequence
  source 1..20: mol_type = other RNA
cagaaaaaaaaaaaaaaggt

SEQ ID NO: 14705 - RNA, 20 nt, synthetic construct
  misc_feature 1..20: note = C9Orf72 GTCN PAM targeting sequence
  source 1..20: mol_type = other RNA
aattctagtcatctgggtca

SEQ ID NO: 14706 - RNA, 20 nt, synthetic construct
  misc_feature 1..20: note = C9Orf72 GTCN PAM targeting sequence
  source 1..20: mol_type = other RNA
tctgggtcacttggtctgtc

SEQ ID NO: 14707 - RNA, 20 nt, synthetic construct
  misc_feature 1..20: note = C9Orf72 GTCN PAM targeting sequence
  source 1..20: mol_type = other RNA
cttggtctgtcacccaggtt

SEQ ID NO: 14708 - RNA, 20 nt, synthetic construct
  misc_feature 1..20: note = C9Orf72 GTCN PAM targeting sequence
  source 1..20: mol_type = other RNA
gtcacccaggttttgctgtg

SEQ ID NO: 14709 - RNA, 20 nt, synthetic construct
  misc_feature 1..20: note = C9Orf72 GTCN PAM targeting sequence
  source 1..20: mol_type = other RNA
cccaggttttgctgtggaaa

SEQ ID NO: 14710 - RNA, 20 nt, synthetic construct
  misc_feature 1..20: note = C9Orf72 GTCN PAM targeting sequence
  source 1..20: mol_type = other RNA
atatttaaaaattaatgatc

SEQ ID NO: 14711 - RNA, 20 nt, synthetic construct
  misc_feature 1..20: note = C9Orf72 GTCN PAM targeting sequence
  source 1..20: mol_type = other RNA
gtgaagatgtttctggaaga

SEQ ID NO: 14712 - RNA, 20 nt, synthetic construct
  misc_feature 1..20: note = C9Orf72 GTCN PAM targeting sequence
  source 1..20: mol_type = other RNA
gctaatttcttccagaaaca

SEQ ID NO: 14713 - RNA, 20 nt, synthetic construct
  misc_feature 1..20: note = C9Orf72 GTCN PAM targeting sequence
  source 1..20: mol_type = other RNA
tctctgggccctcaatggat

SEQ ID NO: 14714 - RNA, 20 nt, synthetic construct
  misc_feature 1..20: note = C9Orf72 GTCN PAM targeting sequence
  source 1..20: mol_type = other RNA
tgaagttcaaaggccagcca

SEQ ID NO: 14715 - RNA, 20 nt, synthetic construct
  misc_feature 1..20: note = C9Orf72 GTCN PAM targeting sequence
  source 1..20: mol_type = other RNA
gctgtttttgagctggagaa

SEQ ID NO: 14716 - RNA, 20 nt, synthetic construct
  misc_feature 1..20: note = C9Orf72 GTCN PAM targeting sequence
  source 1..20: mol_type = other RNA
cccagtctgctgtttttgag

SEQ ID NO: 14717 - RNA, 20 nt, synthetic construct
  misc_feature 1..20: note = C9Orf72 GTCN PAM targeting sequence
  source 1..20: mol_type = other RNA
tatagtgggagctatgggca

SEQ ID NO: 14718 - RNA, 20 nt, synthetic construct
  misc_feature 1..20: note = C9Orf72 GTCN PAM targeting sequence
  source 1..20: mol_type = other RNA
tgtggtcatgcacaagtttc

SEQ ID NO: 14719 - RNA, 20 nt, synthetic construct
  misc_feature 1..20: note = C9Orf72 GTCN PAM targeting sequence
  source 1..20: mol_type = other RNA
tgcacaagtttcactgaaag

SEQ ID NO: 14720 - RNA, 20 nt, synthetic construct
  misc_feature 1..20: note = C9Orf72 GTCN PAM targeting sequence
  source 1..20: mol_type = other RNA
gatttggacaatcatttaac

SEQ ID NO: 14721 - RNA, 20 nt, synthetic construct
  misc_feature 1..20: note = C9Orf72 GTCN PAM targeting sequence
  source 1..20: mol_type = other RNA
aaatcggacaatcattttca

SEQ ID NO: 14722 - RNA, 20 nt, synthetic construct
  misc_feature 1..20: note = C9Orf72 GTCN PAM targeting sequence
  source 1..20: mol_type = other RNA
aaatagcagcatttattgag

SEQ ID NO: 14723 - RNA, 20 nt, synthetic construct
  misc_feature 1..20: note = C9Orf72 GTCN PAM targeting sequence
  source 1..20: mol_type = other RNA
ttaaaaatgagtccagtgcc

SEQ ID NO: 14724 - RNA, 20 nt, synthetic construct
  misc_feature 1..20: note = C9Orf72 GTCN PAM targeting sequence
  source 1..20: mol_type = other RNA
agtgccttttccctgaattt

SEQ ID NO: 14725 - RNA, 20 nt, synthetic construct
  misc_feature 1..20: note = C9Orf72 GTCN PAM targeting sequence
  source 1..20: mol_type = other RNA
gaatttggagaaattcaggg

SEQ ID NO: 14726 - RNA, 20 nt, synthetic construct
  misc_feature 1..20: note = C9Orf72 GTCN PAM targeting sequence
  source 1..20: mol_type = other RNA
tagcttttcaaacataatga

SEQ ID NO: 14727 - RNA, 20 nt, synthetic construct
  misc_feature 1..20: note = C9Orf72 GTCN PAM targeting sequence
  source 1..20: mol_type = other RNA
acagaacacacagtgaaacc

SEQ ID NO: 14728 - RNA, 20 nt, synthetic construct
  misc_feature 1..20: note = C9Orf72 GTCN PAM targeting sequence
  source 1..20: mol_type = other RNA
tgaagccagaggaaggccct

SEQ ID NO: 14729 - RNA, 20 nt, synthetic construct
  misc_feature 1..20: note = C9Orf72 GTCN PAM targeting sequence
  source 1..20: mol_type = other RNA
actcactgtcatgaagccag

SEQ ID NO: 14730 - RNA, 20 nt, synthetic construct
  misc_feature 1..20: note = C9Orf72 GTCN PAM targeting sequence
  source 1..20: mol_type = other RNA
gagcaagagcctgaggcata

SEQ ID NO: 14731 - RNA, 20 nt, synthetic construct
  misc_feature 1..20: note = C9Orf72 GTCN PAM targeting sequence
  source 1..20: mol_type = other RNA
atgcctcaggctcttgctca

SEQ ID NO: 14732 - RNA, 20 nt, synthetic construct
  misc_feature 1..20: note = C9Orf72 GTCN PAM targeting sequence
  source 1..20: mol_type = other RNA
caagactttctcattgtcct

SEQ ID NO: 14733 - RNA, 20 nt, synthetic construct
  misc_feature 1..20: note = C9Orf72 GTCN PAM targeting sequence
  source 1..20: mol_type = other RNA
tgagacttgatattcaaaat

SEQ ID NO: 14734 - RNA, 20 nt, synthetic construct
  misc_feature 1..20: note = C9Orf72 GTCN PAM targeting sequence
  source 1..20: mol_type = other RNA
tcagggtgggttgctgcccc

SEQ ID NO: 14735 - RNA, 20 nt, synthetic construct
  misc_feature 1..20: note = C9Orf72 GTCN PAM targeting sequence
  source 1..20: mol_type = other RNA
ttgacccctagttttgtaag

SEQ ID NO: 14736 - RNA, 20 nt, synthetic construct
  misc_feature 1..20: note = C9Orf72 GTCN PAM targeting sequence
  source 1..20: mol_type = other RNA
atgaccttcatatgggaaca

SEQ ID NO: 14737 - RNA, 20 nt, synthetic construct
  misc_feature 1..20: note = C9Orf72 GTCN PAM targeting sequence
  source 1..20: mol_type = other RNA
aaattctgcaagaataaaca

SEQ ID NO: 14738 - RNA, 20 nt, synthetic construct
  misc_feature 1..20: note = C9Orf72 GTCN PAM targeting sequence
  source 1..20: mol_type = other RNA
ctggtccaaattctgcaaga

SEQ ID NO: 14739 - RNA, 20 nt, synthetic construct
  misc_feature 1..20: note = C9Orf72 GTCN PAM targeting sequence
  source 1..20: mol_type = other RNA
acatgcactgaatcatttgc

SEQ ID NO: 14740 - RNA, 20 nt, synthetic construct
  misc_feature 1..20: note = C9Orf72 GTCN PAM targeting sequence
  source 1..20: mol_type = other RNA
cttgcctgtgtgggtctagg

SEQ ID NO: 14741 - RNA, 20 nt, synthetic construct
  misc_feature 1..20: note = C9Orf72 GTCN PAM targeting sequence
  source 1..20: mol_type = other RNA
aggccagaaaaaaaaaaaat

SEQ ID NO: 14742 - RNA, 20 nt, synthetic construct
  misc_feature 1..20: note = C9Orf72 GTCN PAM targeting sequence
  source 1..20: mol_type = other RNA
ggccaaggtggatcaaagaa

SEQ ID NO: 14743 - RNA, 20 nt, synthetic construct
  misc_feature 1..20: note = C9Orf72 GTCN PAM targeting sequence
  source 1..20: mol_type = other RNA
aaactgagaaccttctttga

SEQ ID NO: 14744 - RNA, 20 nt, synthetic construct
  misc_feature 1..20: note = C9Orf72 GTCN PAM targeting sequence
  source 1..20: mol_type = other RNA
tggctccagcagcttaaatg

SEQ ID NO: 14745 - RNA, 20 nt, synthetic construct
  misc_feature 1..20: note = C9Orf72 GTCN PAM targeting sequence
  source 1..20: mol_type = other RNA
tttaagctgctggagccagg

SEQ ID NO: 14746 - RNA, 20 nt, synthetic construct
  misc_feature 1..20: note = C9Orf72 GTCN PAM targeting sequence
  source 1..20: mol_type = other RNA
tcctggttctaggcacatga

SEQ ID NO: 14747 - RNA, 20 nt, synthetic construct
  misc_feature 1..20: note = C9Orf72 GTCN PAM targeting sequence
  source 1..20: mol_type = other RNA
cccttccacacatacctgta

SEQ ID NO: 14748 - RNA, 20 nt, synthetic construct
  misc_feature 1..20: note = C9Orf72 GTCN PAM targeting sequence
  source 1..20: mol_type = other RNA
taggggtcccccttccacac

SEQ ID NO: 14749 - RNA, 20 nt, synthetic construct
  misc_feature 1..20: note = C9Orf72 GTCN PAM targeting sequence
  source 1..20: mol_type = other RNA
agcagcagtgagactgctgg

SEQ ID NO: 14750 - RNA, 20 nt, synthetic construct
  misc_feature 1..20: note = C9Orf72 GTCN PAM targeting sequence
  source 1..20: mol_type = other RNA
cactgctgctggactgtggc

SEQ ID NO: 14751 - RNA, 20 nt, synthetic construct
  misc_feature 1..20: note = C9Orf72 GTCN PAM targeting sequence
  source 1..20: mol_type = other RNA
gattgcagagcacaaactct

SEQ ID NO: 14752 - RNA, 20 nt, synthetic construct
  misc_feature 1..20: note = C9Orf72 GTCN PAM targeting sequence
  source 1..20: mol_type = other RNA
agtggcctgaaatgattcat

SEQ ID NO: 14753 - RNA, 20 nt, synthetic construct
  misc_feature 1..20: note = C9Orf72 GTCN PAM targeting sequence
  source 1..20: mol_type = other RNA
taaaaaattatttctaaata

SEQ ID NO: 14754 - RNA, 20 nt, synthetic construct
  misc_feature 1..20: note = C9Orf72 GTCN PAM targeting sequence
  source 1..20: mol_type = other RNA
ctgattcccccaaaagataa

SEQ ID NO: 14755 - RNA, 20 nt, synthetic construct
  misc_feature 1..20: note = C9Orf72 GTCN PAM targeting sequence
  source 1..20: mol_type = other RNA
cttaaaatgttagtggtatc

SEQ ID NO: 14756 - RNA, 20 nt, synthetic construct
  misc_feature 1..20: note = C9Orf72 GTCN PAM targeting sequence
  source 1..20: mol_type = other RNA
tcccaatgataccactaaca

SEQ ID NO: 14757 - RNA, 20 nt, synthetic construct
  misc_feature 1..20: note = C9Orf72 GTCN PAM targeting sequence
  source 1..20: mol_type = other RNA
gggaagtccgtaaatcccct

SEQ ID NO: 14758 - RNA, 20 nt, synthetic construct
  misc_feature 1..20: note = C9Orf72 GTCN PAM targeting sequence
  source 1..20: mol_type = other RNA
gtaaatccccttgcttcaga

SEQ ID NO: 14759 - RNA, 20 nt, synthetic construct
  misc_feature 1..20: note = C9Orf72 GTCN PAM targeting sequence
  source 1..20: mol_type = other RNA
gtaagctctgaatgaatgaa

SEQ ID NO: 14760 - RNA, 20 nt, synthetic construct
  misc_feature 1..20: note = C9Orf72 GTCN PAM targeting sequence
  source 1..20: mol_type = other RNA
tggcaagcactatgttggaa

SEQ ID NO: 14761 - RNA, 20 nt, synthetic construct
  misc_feature 1..20: note = C9Orf72 GTCN PAM targeting sequence
  source 1..20: mol_type = other RNA
tatacatcattgtatttcca

SEQ ID NO: 14762 - RNA, 20 nt, synthetic construct
  misc_feature 1..20: note = C9Orf72 GTCN PAM targeting sequence
  source 1..20: mol_type = other RNA
ttgtcttatacatcattgta

SEQ ID NO: 14763 - RNA, 20 nt, synthetic construct
  misc_feature 1..20: note = C9Orf72 GTCN PAM targeting sequence
  source 1..20: mol_type = other RNA
aatgggagacaaaacaaacc

SEQ ID NO: 14764 - RNA, 20 nt, synthetic construct
  misc_feature 1..20: note = C9Orf72 GTCN PAM targeting sequence
  source 1..20: mol_type = other RNA
cccattagactgtgagctcc

SEQ ID NO: 14765 - RNA, 20 nt, synthetic construct
  misc_feature 1..20: note = C9Orf72 GTCN PAM targeting sequence
  source 1..20: mol_type = other RNA
atgcaccagcttattcccaa

SEQ ID NO: 14766 - RNA, 20 nt, synthetic construct
  misc_feature 1..20: note = C9Orf72 GTCN PAM targeting sequence
  source 1..20: mol_type = other RNA
ggaatactctcaactaaaag

SEQ ID NO: 14767 - RNA, 20 nt, synthetic construct
  misc_feature 1..20: note = C9Orf72 GTCN PAM targeting sequence
  source 1..20: mol_type = other RNA
ggggaaactacaaatagttc

SEQ ID NO: 14768 - RNA, 20 nt, synthetic construct
  misc_feature 1..20: note = C9Orf72 GTCN PAM targeting sequence
  source 1..20: mol_type = other RNA
ctcactgctcctgccttcat

SEQ ID NO: 14769 - RNA, 20 nt, synthetic construct
  misc_feature 1..20: note = C9Orf72 GTCN PAM targeting sequence
  source 1..20: mol_type = other RNA
atgagggctttttttttttg

SEQ ID NO: 14770 - RNA, 20 nt, synthetic construct
  misc_feature 1..20: note = C9Orf72 GTCN PAM targeting sequence
  source 1..20: mol_type = other RNA
caaaaaaaaaaagccctcat

SEQ ID NO: 14771 - RNA, 20 nt, synthetic construct
  misc_feature 1..20: note = C9Orf72 GTCN PAM targeting sequence
  source 1..20: mol_type = other RNA
cactctgtcgcccaggctgg

SEQ ID NO: 14772 - RNA, 20 nt, synthetic construct
  misc_feature 1..20: note = C9Orf72 GTCN PAM targeting sequence
  source 1..20: mol_type = other RNA
cccaggctggagtgcagtgg

SEQ ID NO: 14773 - RNA, 20 nt, synthetic construct
  misc_feature 1..20: note = C9Orf72 GTCN PAM targeting sequence
  source 1..20: mol_type = other RNA
cagctacttgggaggctgag

SEQ ID NO: 14774 - RNA, 20 nt, synthetic construct
  misc_feature 1..20: note = C9Orf72 GTCN PAM targeting sequence
  source 1..20: mol_type = other RNA
cgatggtctcaatctcttga

SEQ ID NO: 14775 - RNA, 20 nt, synthetic construct
  misc_feature 1..20: note = C9Orf72 GTCN PAM targeting sequence
  source 1..20: mol_type = other RNA
caatctcttgacctcgtgat

SEQ ID NO: 14776 - RNA, 20 nt, synthetic construct
  misc_feature 1..20: note = C9Orf72 GTCN PAM targeting sequence
  source 1..20: mol_type = other RNA
agagattgagaccatcgtga

SEQ ID NO: 14777 - RNA, 20 nt, synthetic construct
  misc_feature 1..20: note = C9Orf72 GTCN PAM targeting sequence
  source 1..20: mol_type = other RNA
ggcctcaatgagggcttttt

SEQ ID NO: 14778 - RNA, 20 nt, synthetic construct
  misc_feature 1..20: note = C9Orf72 GTCN PAM targeting sequence
  source 1..20: mol_type = other RNA
ggagtttcctattagaaaga

SEQ ID NO: 14779 - RNA, 20 nt, synthetic construct
  misc_feature 1..20: note = C9Orf72 GTCN PAM targeting sequence
  source 1..20: mol_type = other RNA
ccatgatttcacccactagc

SEQ ID NO: 14780 - RNA, 20 nt, synthetic construct
  misc_feature 1..20: note = C9Orf72 GTCN PAM targeting sequence
  source 1..20: mol_type = other RNA
agattaattcaacagcttcc

SEQ ID NO: 14781 - RNA, 20 nt, synthetic construct
  misc_feature 1..20: note = C9Orf72 GTCN PAM targeting sequence
  source 1..20: mol_type = other RNA
taatagtggcagtggagatg

SEQ ID NO: 14782 - RNA, 20 nt, synthetic construct
  misc_feature 1..20: note = C9Orf72 GTCN PAM targeting sequence
  source 1..20: mol_type = other RNA
actttactccatctccactg

SEQ ID NO: 14783 - RNA, 20 nt, synthetic construct
  misc_feature 1..20: note = C9Orf72 GTCN PAM targeting sequence
  source 1..20: mol_type = other RNA
ttgtagggaatgaaaaaaaa

SEQ ID NO: 14784 - RNA, 20 nt, synthetic construct
  misc_feature 1..20: note = C9Orf72 GTCN PAM targeting sequence
  source 1..20: mol_type = other RNA
ctacctcattgcatgtggca

SEQ ID NO: 14785 - RNA, 20 nt, synthetic construct
  misc_feature 1..20: note = C9Orf72 GTCN PAM targeting sequence
  source 1..20: mol_type = other RNA
gtaacaagattatttcctta

SEQ ID NO: 14786 - RNA, 20 nt, synthetic construct
  misc_feature 1..20: note = C9Orf72 GTCN PAM targeting sequence
  source 1..20: mol_type = other RNA
taatcatcatcaccattaag

SEQ ID NO: 14787 - RNA, 20 nt, synthetic construct
  misc_feature 1..20: note = C9Orf72 GTCN PAM targeting sequence
  source 1..20: mol_type = other RNA
aataaaattgggttgcagct

SEQ ID NO: 14788 - RNA, 20 nt, synthetic construct
  misc_feature 1..20: note = C9Orf72 GTCN PAM targeting sequence
  source 1..20: mol_type = other RNA
cttgaagattaagtgggtta

SEQ ID NO: 14789 - RNA, 20 nt, synthetic construct
  misc_feature 1..20: note = C9Orf72 GTCN PAM targeting sequence
  source 1..20: mol_type = other RNA
tcatctattctttaagagta

SEQ ID NO: 14790 - RNA, 20 nt, synthetic construct
  misc_feature 1..20: note = C9Orf72 GTCN PAM targeting sequence
  source 1..20: mol_type = other RNA
gtgctgcctcagtgtcctca

SEQ ID NO: 14791 - RNA, 20 nt, synthetic construct
  misc_feature 1..20: note = C9Orf72 GTCN PAM targeting sequence
  source 1..20: mol_type = other RNA
aaggtcacacagctaggaag

SEQ ID NO: 14792 - RNA, 20 nt, synthetic construct
  misc_feature 1..20: note = C9Orf72 GTCN PAM targeting sequence
  source 1..20: mol_type = other RNA
cacagctaggaagtgagaaa

SEQ ID NO: 14793 - RNA, 20 nt, synthetic construct
  misc_feature 1..20: note = C9Orf72 GTCN PAM targeting sequence
  source 1..20: mol_type = other RNA
tagaaccagatttccaaggc

SEQ ID NO: 14794 - RNA, 20 nt, synthetic construct
  misc_feature 1..20: note = C9Orf72 GTCN PAM targeting sequence
  source 1..20: mol_type = other RNA
ttgtaaattgataggagaat

SEQ ID NO: 14795 - RNA, 20 nt, synthetic construct
  misc_feature 1..20: note = C9Orf72 GTCN PAM targeting sequence
  source 1..20: mol_type = other RNA
ttctccataaaactcaattt

SEQ ID NO: 14796 - RNA, 20 nt, synthetic construct
  misc_feature 1..20: note = C9Orf72 GTCN PAM targeting sequence
  source 1..20: mol_type = other RNA
gttttagtgctcaaattgag

SEQ ID NO: 14797 - RNA, 20 nt, synthetic construct
  misc_feature 1..20: note = C9Orf72 GTCN PAM targeting sequence
  source 1..20: mol_type = other RNA
ccgcactactttttattgtg

SEQ ID NO: 14798 - RNA, 20 nt, synthetic construct
  misc_feature 1..20: note = C9Orf72 GTCN PAM targeting sequence
  source 1..20: mol_type = other RNA
ctaaaaacatcttaggagtg

SEQ ID NO: 14799 - RNA, 20 nt, synthetic construct
  misc_feature 1..20: note = C9Orf72 GTCN PAM targeting sequence
  source 1..20: mol_type = other RNA
agttttaaaattcccttatg

SEQ ID NO: 14800 - RNA, 20 nt, synthetic construct
  misc_feature 1..20: note = C9Orf72 GTCN PAM targeting sequence
  source 1..20: mol_type = other RNA
ttcctgagctgagttggctc

SEQ ID NO: 14801 - RNA, 20 nt, synthetic construct
  misc_feature 1..20: note = C9Orf72 GTCN PAM targeting sequence
  source 1..20: mol_type = other RNA
gcgctccacagatggatact

SEQ ID NO: 14802 - RNA, 20 nt, synthetic construct
  misc_feature 1..20: note = C9Orf72 GTCN PAM targeting sequence
  source 1..20: mol_type = other RNA
taattggtctgatgaaaagt

SEQ ID NO: 14803 - RNA, 20 nt, synthetic construct
  misc_feature 1..20: note = C9Orf72 GTCN PAM targeting sequence
  source 1..20: mol_type = other RNA
gatgaaaagtacttagcaat

SEQ ID NO: 14804 - RNA, 20 nt, synthetic construct
  misc_feature 1..20: note = C9Orf72 GTCN PAM targeting sequence
  source 1..20: mol_type = other RNA
cagtgcctagcatggtgcca

SEQ ID NO: 14805 - RNA, 20 nt, synthetic construct
  misc_feature 1..20: note = C9Orf72 GTCN PAM targeting sequence
  source 1..20: mol_type = other RNA
ttttcatttttgtgtctcag

SEQ ID NO: 14806 - RNA, 20 nt, synthetic construct
  misc_feature 1..20: note = C9Orf72 GTCN PAM targeting sequence
  source 1..20: mol_type = other RNA
agctagtacgtatttctttt

SEQ ID NO: 14807 - RNA, 20 nt, synthetic construct
  misc_feature 1..20: note = C9Orf72 GTCN PAM targeting sequence
  source 1..20: mol_type = other RNA
aaaattctagcacagtttct

SEQ ID NO: 14808 - RNA, 20 nt, synthetic construct
  misc_feature 1..20: note = C9Orf72 GTCN PAM targeting sequence
  source 1..20: mol_type = other RNA
tttaaaagcgctggtgtcca

SEQ ID NO: 14809 - RNA, 20 nt, synthetic construct
  misc_feature 1..20: note = C9Orf72 GTCN PAM targeting sequence
  source 1..20: mol_type = other RNA
aagtttttgaggttttccca

SEQ ID NO: 14810 - RNA, 20 nt, synthetic construct
  misc_feature 1..20: note = C9Orf72 GTCN PAM targeting sequence
  source 1..20: mol_type = other RNA
gagaacatattttctatgac

SEQ ID NO: 14811 - RNA, 20 nt, synthetic construct
  misc_feature 1..20: note = C9Orf72 GTCN PAM targeting sequence
  source 1..20: mol_type = other RNA
tagaaaatatgttctctgac

SEQ ID NO: 14812 - RNA, 20 nt, synthetic construct
  misc_feature 1..20: note = C9Orf72 GTCN PAM targeting sequence
  source 1..20: mol_type = other RNA
atcttggtacatgtttcatg

SEQ ID NO: 14813 - RNA, 20 nt, synthetic construct
  misc_feature 1..20: note = C9Orf72 GTCN PAM targeting sequence
  source 1..20: mol_type = other RNA
ccaacaacaataaatcacac

SEQ ID NO: 14814 - RNA, 20 nt, synthetic construct
  misc_feature 1..20: note = C9Orf72 GTCN PAM targeting sequence
  source 1..20: mol_type = other RNA
tttaagtcaaattgtttgat

SEQ ID NO: 14815 - RNA, 20 nt, synthetic construct
  misc_feature 1..20: note = C9Orf72 GTCN PAM targeting sequence
  source 1..20: mol_type = other RNA
aattgtttgatagtcttgtt

SEQ ID NO: 14816 - RNA, 20 nt, synthetic construct
  misc_feature 1..20: note = C9Orf72 GTCN PAM targeting sequence
  source 1..20: mol_type = other RNA
tgttctaatcttctatatcc

SEQ ID NO: 14817 - RNA, 20 nt, synthetic construct
  misc_feature 1..20: note = C9Orf72 GTCN PAM targeting sequence
  source 1..20: mol_type = other RNA
ggagatcgagaccatcctgg

SEQ ID NO: 14818 - RNA, 20 nt, synthetic construct
  misc_feature 1..20: note = C9Orf72 GTCN PAM targeting sequence
  source 1..20: mol_type = other RNA
cgatctcctgacctcgtgat

SEQ ID NO: 14819 - RNA, 20 nt, synthetic construct
  misc_feature 1..20: note = C9Orf72 GTCN PAM targeting sequence
  source 1..20: mol_type = other RNA
ctactaaaaatacaaaaaaa

SEQ ID NO: 14820 - RNA, 20 nt, synthetic construct
  misc_feature 1..20: note = C9Orf72 GTCN PAM targeting sequence
  source 1..20: mol_type = other RNA
cagctactggggaggctgaa

SEQ ID NO: 14821 - RNA, 20 nt, synthetic construct
  misc_feature 1..20: note = C9Orf72 GTCN PAM targeting sequence
  source 1..20: mol_type = other RNA
cccaggctggagtgcagtgg

SEQ ID NO: 14822 - RNA, 20 nt, synthetic construct
  misc_feature 1..20: note = C9Orf72 GTCN PAM targeting sequence
  source 1..20: mol_type = other RNA
acaattatgtttggagattt

SEQ ID NO: 14823 - RNA, 20 nt, synthetic construct
  misc_feature 1..20: note = C9Orf72 GTCN PAM targeting sequence
  source 1..20: mol_type = other RNA
acttcttacagttctatcag

SEQ ID NO: 14824 - RNA, 20 nt, synthetic construct
  misc_feature 1..20: note = C9Orf72 GTCN PAM targeting sequence
  source 1..20: mol_type = other RNA
aaatagatgaagcaaaaact

SEQ ID NO: 14825 - RNA, 20 nt, synthetic construct
  misc_feature 1..20: note = C9Orf72 GTCN PAM targeting sequence
  source 1..20: mol_type = other RNA
taaatgttttttcacctcat

SEQ ID NO: 14826 - RNA, 20 nt, synthetic construct
  misc_feature 1..20: note = C9Orf72 GTCN PAM targeting sequence
  source 1..20: mol_type = other RNA
gttcagcaaaaggatataac

SEQ ID NO: 14827 - RNA, 20 nt, synthetic construct
  misc_feature 1..20: note = C9Orf72 GTCN PAM targeting sequence
  source 1..20: mol_type = other RNA
ctccagttttcttctaatta

SEQ ID NO: 14828 - RNA, 20 nt, synthetic construct
  misc_feature 1..20: note = C9Orf72 GTCN PAM targeting sequence
  source 1..20: mol_type = other RNA
tttatttttaaggtgtgttt

SEQ ID NO: 14829 - RNA, 20 nt, synthetic construct
  misc_feature 1..20: note = C9Orf72 GTCN PAM targeting sequence
  source 1..20: mol_type = other RNA
tgcttttttatctgatctga

SEQ ID NO: 14830 - RNA, 20 nt, synthetic construct
  misc_feature 1..20: note = C9Orf72 GTCN PAM targeting sequence
  source 1..20: mol_type = other RNA
ttaaaaaatcagattttcag

SEQ ID NO: 14831 - RNA, 20 nt, synthetic construct
  misc_feature 1..20: note = C9Orf72 GTCN PAM targeting sequence
  source 1..20: mol_type = other RNA
tttcacaatgtatacttatt

SEQ ID NO: 14832 - RNA, 20 nt, synthetic construct
  misc_feature 1..20: note = C9Orf72 GTCN PAM targeting sequence
  source 1..20: mol_type = other RNA
cattgtacaatagatctctt

SEQ ID NO: 14833 - RNA, 20 nt, synthetic construct
  misc_feature 1..20: note = C9Orf72 GTCN PAM targeting sequence
  source 1..20: mol_type = other RNA
aactttgaccaacatctccc

SEQ ID NO: 14834 - RNA, 20 nt, synthetic construct
  misc_feature 1..20: note = C9Orf72 GTCN PAM targeting sequence
  source 1..20: mol_type = other RNA
aagttagacaggaggaataa

SEQ ID NO: 14835 - RNA, 20 nt, synthetic construct
  misc_feature 1..20: note = C9Orf72 GTCN PAM targeting sequence
  source 1..20: mol_type = other RNA
gagattgttaataccacatg

SEQ ID NO: 14836 - RNA, 20 nt, synthetic construct
  misc_feature 1..20: note = C9Orf72 GTCN PAM targeting sequence
  source 1..20: mol_type = other RNA
attatcttttaaagatattt

SEQ ID NO: 14837 - RNA, 20 nt, synthetic construct
  misc_feature 1..20: note = C9Orf72 GTCN PAM targeting sequence
  source 1..20: mol_type = other RNA
taacgtttttatttctacaa

SEQ ID NO: 14838 - RNA, 20 nt, synthetic construct
  misc_feature 1..20: note = C9Orf72 GTCN PAM targeting sequence
  source 1..20: mol_type = other RNA
ttttgctgttatggtcttaa

SEQ ID NO: 14839 - RNA, 20 nt, synthetic construct
  misc_feature 1..20: note = C9Orf72 GTCN PAM targeting sequence
  source 1..20: mol_type = other RNA
agtagtatataaactggtta

SEQ ID NO: 14840 - RNA, 20 nt, synthetic construct
  misc_feature 1..20: note = C9Orf72 GTCN PAM targeting sequence
  source 1..20: mol_type = other RNA
tattaactatactctttgat

SEQ ID NO: 14841 - RNA, 20 nt, synthetic construct
  misc_feature 1..20: note = C9Orf72 GTCN PAM targeting sequence
  source 1..20: mol_type = other RNA
tttctattgtcttattaact

SEQ ID NO: 14842 - RNA, 20 nt, synthetic construct
  misc_feature 1..20: note = C9Orf72 GTCN PAM targeting sequence
  source 1..20: mol_type = other RNA
tcttgctgttttctatttgt

SEQ ID NO: 14843 - RNA, 20 nt, synthetic construct
  misc_feature 1..20: note = C9Orf72 GTCN PAM targeting sequence
  source 1..20: mol_type = other RNA
gattggatgaaaaagcattt

SEQ ID NO: 14844 - RNA, 20 nt, synthetic construct
  misc_feature 1..20: note = C9Orf72 GTCN PAM targeting sequence
  source 1..20: mol_type = other RNA
ggtactgaactaaggatcgt

SEQ ID NO: 14845 - RNA, 20 nt, synthetic construct
  misc_feature 1..20: note = C9Orf72 GTCN PAM targeting sequence
  source 1..20: mol_type = other RNA
cattaaatcctctggtgaag

SEQ ID NO: 14846 - RNA, 20 nt, synthetic construct
  misc_feature 1..20: note = C9Orf72 GTCN PAM targeting sequence
  source 1..20: mol_type = other RNA
acttgcactattcagagccc

SEQ ID NO: 14847 - RNA, 20 nt, synthetic construct
  misc_feature 1..20: note = C9Orf72 GTCN PAM targeting sequence
  source 1..20: mol_type = other RNA
ttgccatgggcacagctcct

SEQ ID NO: 14848 - RNA, 20 nt, synthetic construct
  misc_feature 1..20: note = C9Orf72 GTCN PAM targeting sequence
  source 1..20: mol_type = other RNA
gggatgaaatccacctttac

SEQ ID NO: 14849 - RNA, 20 nt, synthetic construct
  misc_feature 1..20: note = C9Orf72 GTCN PAM targeting sequence
  source 1..20: mol_type = other RNA
cacagctggtaaaggtggat

SEQ ID NO: 14850 - RNA, 20 nt, synthetic construct
  misc_feature 1..20: note = C9Orf72 GTCN PAM targeting sequence
  source 1..20: mol_type = other RNA
catagtgttactgtgtgtta

SEQ ID NO: 14851 - RNA, 20 nt, synthetic construct
  misc_feature 1..20: note = C9Orf72 GTCN PAM targeting sequence
  source 1..20: mol_type = other RNA
accacctccatttaacacac

SEQ ID NO: 14852 - RNA, 20 nt, synthetic construct
  misc_feature 1..20: note = C9Orf72 GTCN PAM targeting sequence
  source 1..20: mol_type = other RNA
tcttttaaagaaacctctca

SEQ ID NO: 14853 - RNA, 20 nt, synthetic construct
  misc_feature 1..20: note = C9Orf72 GTCN PAM targeting sequence
  source 1..20: mol_type = other RNA
aacctattcctagctttgca

SEQ ID NO: 14854 - RNA, 20 nt, synthetic construct
  misc_feature 1..20: note = C9Orf72 GTCN PAM targeting sequence
  source 1..20: mol_type = other RNA
tttcaaagaaaaaatattta

SEQ ID NO: 14855 - RNA, 20 nt, synthetic construct
  misc_feature 1..20: note = C9Orf72 GTCN PAM targeting sequence
  source 1..20: mol_type = other RNA
tgctggatctaaactttttt

SEQ ID NO: 14856 - RNA, 20 nt, synthetic construct
  misc_feature 1..20: note = C9Orf72 GTCN PAM targeting sequence
  source 1..20: mol_type = other RNA
gctgaacagaagctgatcag

SEQ ID NO: 14857 - RNA, 20 nt, synthetic construct
  misc_feature 1..20: note = C9Orf72 GTCN PAM targeting sequence
  source 1..20: mol_type = other RNA
tcaaatatcatagtattttt

SEQ ID NO: 14858 - RNA, 20 nt, synthetic construct
  misc_feature 1..20: note = C9Orf72 GTCN PAM targeting sequence
  source 1..20: mol_type = other RNA
catactgtgttttttacatg

SEQ ID NO: 14859 - RNA, 20 nt, synthetic construct
  misc_feature 1..20: note = C9Orf72 GTCN PAM targeting sequence
  source 1..20: mol_type = other RNA
tttaaaaaatatataaatac

SEQ ID NO: 14860 - RNA, 20 nt, synthetic construct
  misc_feature 1..20: note = C9Orf72 GTCN PAM targeting sequence
  source 1..20: mol_type = other RNA
tctagttcagtggttgtcta

SEQ ID NO: 14861 - RNA, 20 nt, synthetic construct
  misc_feature 1..20: note = C9Orf72 GTCN PAM targeting sequence
  source 1..20: mol_type = other RNA
aaaacatcaagctgtccaca

SEQ ID NO: 14862 - RNA, 20 nt, synthetic construct
  misc_feature 1..20: note = C9Orf72 GTCN PAM targeting sequence
  source 1..20: mol_type = other RNA
acatctttctgattcatgat

SEQ ID NO: 14863 - RNA, 20 nt, synthetic construct
  misc_feature 1..20: note = C9Orf72 GTCN PAM targeting sequence
  source 1..20: mol_type = other RNA
taatagctttcccatcatga

SEQ ID NO: 14864 - RNA, 20 nt, synthetic construct
  misc_feature 1..20: note = C9Orf72 GTCN PAM targeting sequence
  source 1..20: mol_type = other RNA
ttttgttgtgtaaatttggt

SEQ ID NO: 14865 - RNA, 20 nt, synthetic construct
  misc_feature 1..20: note = C9Orf72 GTCN PAM targeting sequence
  source 1..20: mol_type = other RNA
acattgtgttagaattatat

SEQ ID NO: 14866 - RNA, 20 nt, synthetic construct
  misc_feature 1..20: note = C9Orf72 GTCN PAM targeting sequence
  source 1..20: mol_type = other RNA
aaacgcattaagaaaacaaa

SEQ ID NO: 14867 - RNA, 20 nt, synthetic construct
  misc_feature 1..20: note = C9Orf72 GTCN PAM targeting sequence
  source 1..20: mol_type = other RNA
taccatgtacctgctttggc

SEQ ID NO: 14868 - RNA, 20 nt, synthetic construct
  misc_feature 1..20: note = C9Orf72 GTCN PAM targeting sequence
  source 1..20: mol_type = other RNA
ttttcatcttgttttcttct

SEQ ID NO: 14869 - RNA, 20 nt, synthetic construct
  misc_feature 1..20: note = C9Orf72 GTCN PAM targeting sequence
  source 1..20: mol_type = other RNA
gtcattttcatcttgttttc

SEQ ID NO: 14870 - RNA, 20 nt, synthetic construct
  misc_feature 1..20: note = C9Orf72 GTCN PAM targeting sequence
  source 1..20: mol_type = other RNA
ttgttcctggtgaaccacag

SEQ ID NO: 14871 - RNA, 20 nt, synthetic construct
  misc_feature 1..20: note = C9Orf72 GTCN PAM targeting sequence
  source 1..20: mol_type = other RNA
aatagttctctatagtcctt

SEQ ID NO: 14872 - RNA, 20 nt, synthetic construct
  misc_feature 1..20: note = C9Orf72 GTCN PAM targeting sequence
  source 1..20: mol_type = other RNA
gtagaaatgtctaatagttc

SEQ ID NO: 14873 - RNA, 20 nt, synthetic construct
  misc_feature 1..20: note = C9Orf72 GTCN PAM targeting sequence
  source 1..20: mol_type = other RNA
ctgggattcagtctgtagaa

SEQ ID NO: 14874 - RNA, 20 nt, synthetic construct
  misc_feature 1..20: note = C9Orf72 GTCN PAM targeting sequence
  source 1..20: mol_type = other RNA
actatctgtaaaagccaact

SEQ ID NO: 14875 - RNA, 20 nt, synthetic construct
  misc_feature 1..20: note = C9Orf72 GTCN PAM targeting sequence
  source 1..20: mol_type = other RNA
aggtgaaatctgagttggct

SEQ ID NO: 14876 - RNA, 20 nt, synthetic construct
  misc_feature 1..20: note = C9Orf72 GTCN PAM targeting sequence
  source 1..20: mol_type = other RNA
agtttacatcctattattat

SEQ ID NO: 14877 - RNA, 20 nt, synthetic construct
  misc_feature 1..20: note = C9Orf72 GTCN PAM targeting sequence
  source 1..20: mol_type = other RNA
gtatcccaaaagcataaatc

SEQ ID NO: 14878 - RNA, 20 nt, synthetic construct
  misc_feature 1..20: note = C9Orf72 GTCN PAM targeting sequence
  source 1..20: mol_type = other RNA
cttttcctagatttatgctt

SEQ ID NO: 14879 - RNA, 20 nt, synthetic construct
  misc_feature 1..20: note = C9Orf72 GTCN PAM targeting sequence
  source 1..20: mol_type = other RNA
ggtgcatcattacattgggt

SEQ ID NO: 14880 - RNA, 20 nt, synthetic construct
  misc_feature 1..20: note = C9Orf72 GTCN PAM targeting sequence
  source 1..20: mol_type = other RNA
ttagaacatctcgttcttgc

SEQ ID NO: 14881 - RNA, 20 nt, synthetic construct
  misc_feature 1..20: note = C9Orf72 GTCN PAM targeting sequence
  source 1..20: mol_type = other RNA
tccaaagataaaagagtgta

SEQ ID NO: 14882 - RNA, 20 nt, synthetic construct
  misc_feature 1..20: note = C9Orf72 GTCN PAM targeting sequence
  source 1..20: mol_type = other RNA
atcttcaggttccgaagaga

SEQ ID NO: 14883 - RNA, 20 nt, synthetic construct
  misc_feature 1..20: note = C9Orf72 GTCN PAM targeting sequence
  source 1..20: mol_type = other RNA
tctatatattttattagtgt

SEQ ID NO: 14884 - RNA, 20 nt, synthetic construct
  misc_feature 1..20: note = C9Orf72 GTCN PAM targeting sequence
  source 1..20: mol_type = other RNA
aggcttttctgtgaaggaca

SEQ ID NO: 14885 - RNA, 20 nt, synthetic construct
  misc_feature 1..20: note = C9Orf72 GTCN PAM targeting sequence
  source 1..20: mol_type = other RNA
ttcacagaaaagccttgaca

SEQ ID NO: 14886 - RNA, 20 nt, synthetic construct
  misc_feature 1..20: note = C9Orf72 GTCN PAM targeting sequence
  source 1..20: mol_type = other RNA
ttcagctgaaacctggctta

SEQ ID NO: 14887 - RNA, 20 nt, synthetic construct
  misc_feature 1..20: note = C9Orf72 GTCN PAM targeting sequence
  source 1..20: mol_type = other RNA
tagaaacttctgtacgagta

SEQ ID NO: 14888 - RNA, 20 nt, synthetic construct
  misc_feature 1..20: note = C9Orf72 GTCN PAM targeting sequence
  source 1..20: mol_type = other RNA
acactgtcatagaaacttct

SEQ ID NO: 14889 - RNA, 20 nt, synthetic construct
  misc_feature 1..20: note = C9Orf72 GTCN PAM targeting sequence
  source 1..20: mol_type = other RNA
gccaagcactgtcaacactg

SEQ ID NO: 14890 - RNA, 20 nt, synthetic construct
  misc_feature 1..20: note = C9Orf72 GTCN PAM targeting sequence
  source 1..20: mol_type = other RNA
caaaaaaaaaaaaaaatatc

SEQ ID NO: 14891 - RNA, 20 nt, synthetic construct
  misc_feature 1..20: note = C9Orf72 GTCN PAM targeting sequence
  source 1..20: mol_type = other RNA
agctctgtcaccaggctaaa

SEQ ID NO: 14892 - RNA, 20 nt, synthetic construct
  misc_feature 1..20: note = C9Orf72 GTCN PAM targeting sequence
  source 1..20: mol_type = other RNA
ccaggctaaagtgcagtggc

SEQ ID NO: 14893 - RNA, 20 nt, synthetic construct
  misc_feature 1..20: note = C9Orf72 GTCN PAM targeting sequence
  source 1..20: mol_type = other RNA
agatcgcgccactgcacttt

SEQ ID NO: 14894 - RNA, 20 nt, synthetic construct
  misc_feature 1..20: note = C9Orf72 GTCN PAM targeting sequence
  source 1..20: mol_type = other RNA
ctactaagtatacaaaaatt

SEQ ID NO: 14895 - RNA, 20 nt, synthetic construct
  misc_feature 1..20: note = C9Orf72 GTCN PAM targeting sequence
  source 1..20: mol_type = other RNA
cgatctcctgaccttgtgat

SEQ ID NO: 14896 - RNA, 20 nt, synthetic construct
  misc_feature 1..20: note = C9Orf72 GTCN PAM targeting sequence
  source 1..20: mol_type = other RNA
ggagatcgagaccatcctgc

SEQ ID NO: 14897 - RNA, 20 nt, synthetic construct
  misc_feature 1..20: note = C9Orf72 GTCN PAM targeting sequence
  source 1..20: mol_type = other RNA
gaggtgggtggatcacaagg

SEQ ID NO: 14898 - RNA, 20 nt, synthetic construct
  misc_feature 1..20: note = C9Orf72 GTCN PAM targeting sequence
  source 1..20: mol_type = other RNA
gggcctggtggcttatgcct

SEQ ID NO: 14899 - RNA, 20 nt, synthetic construct
  misc_feature 1..20: note = C9Orf72 GTCN PAM targeting sequence
  source 1..20: mol_type = other RNA
gattgtctgggcctggtggc

SEQ ID NO: 14900 - RNA, 20 nt, synthetic construct
  misc_feature 1..20: note = C9Orf72 GTCN PAM targeting sequence
  source 1..20: mol_type = other RNA
caaaaccataggctcatctt

SEQ ID NO: 14901 - RNA, 20 nt, synthetic construct
  misc_feature 1..20: note = C9Orf72 GTCN PAM targeting sequence
  source 1..20: mol_type = other RNA
gcttgagaagcatgaaattc

SEQ ID NO: 14902 - RNA, 20 nt, synthetic construct
  misc_feature 1..20: note = C9Orf72 GTCN PAM targeting sequence
  source 1..20: mol_type = other RNA
cagacctcatagatctcaat

SEQ ID NO: 14903 - RNA, 20 nt, synthetic construct
  misc_feature 1..20: note = C9Orf72 GTCN PAM targeting sequence
  source 1..20: mol_type = other RNA
gtgacatattgcgaagttca

SEQ ID NO: 14904 - RNA, 20 nt, synthetic construct
  misc_feature 1..20: note = C9Orf72 GTCN PAM targeting sequence
  source 1..20: mol_type = other RNA
tagataaagctttgaaataa

SEQ ID NO: 14905 - RNA, 20 nt, synthetic construct
  misc_feature 1..20: note = C9Orf72 GTCN PAM targeting sequence
  source 1..20: mol_type = other RNA
tttcaggcaaataaacaacc

SEQ ID NO: 14906 - RNA, 20 nt, synthetic construct
  misc_feature 1..20: note = C9Orf72 GTCN PAM targeting sequence
  source 1..20: mol_type = other RNA
aacaacaaacattttaattc

SEQ ID NO: 14907 - RNA, 20 nt, synthetic construct
  misc_feature 1..20: note = C9Orf72 GTCN PAM targeting sequence
  source 1..20: mol_type = other RNA
aaaggaaaaatcatttagac

SEQ ID NO: 14908 - RNA, 20 nt, synthetic construct
  misc_feature 1..20: note = C9Orf72 GTCN PAM targeting sequence
  source 1..20: mol_type = other RNA
aaatgatttttccttttgac

SEQ ID NO: 14909 - RNA, 20 nt, synthetic construct
  misc_feature 1..20: note = C9Orf72 GTCN PAM targeting sequence
  source 1..20: mol_type = other RNA
ttctaaagtgtctaaatgat

SEQ ID NO: 14910 - RNA, 20 nt, synthetic construct
  misc_feature 1..20: note = C9Orf72 GTCN PAM targeting sequence
  source 1..20: mol_type = other RNA
ggtctttctaaagtgtctaa

SEQ ID NO: 14911 - RNA, 20 nt, synthetic construct
  misc_feature 1..20: note = C9Orf72 GTCN PAM targeting sequence
  source 1..20: mol_type = other RNA
taatctgttttattaggtgc

SEQ ID NO: 14912 - RNA, 20 nt, synthetic construct
  misc_feature 1..20: note = C9Orf72 GTCN PAM targeting sequence
  source 1..20: mol_type = other RNA
gatttcactttgatacatgt

SEQ ID NO: 14913 - RNA, 20 nt, synthetic construct
  misc_feature 1..20: note = C9Orf72 GTCN PAM targeting sequence
  source 1..20: mol_type = other RNA
actttatatcttattattat

SEQ ID NO: 14914 - RNA, 20 nt, synthetic construct
  misc_feature 1..20: note = C9Orf72 GTCN PAM targeting sequence
  source 1..20: mol_type = other RNA
gaattcccgaagcataaatc

SEQ ID NO: 14915 - RNA, 20 nt, synthetic construct
  misc_feature 1..20: note = C9Orf72 GTCN PAM targeting sequence
  source 1..20: mol_type = other RNA
tagatttatgcttcgggaat

SEQ ID NO: 14916 - RNA, 20 nt, synthetic construct
  misc_feature 1..20: note = C9Orf72 GTCN PAM targeting sequence
  source 1..20: mol_type = other RNA
agtgcatcattacattggtt

SEQ ID NO: 14917 - RNA, 20 nt, synthetic construct
  misc_feature 1..20: note = C9Orf72 GTCN PAM targeting sequence
  source 1..20: mol_type = other RNA
gtgagggcatgtcaagtgca

SEQ ID NO: 14918 - RNA, 20 nt, synthetic construct
  misc_feature 1..20: note = C9Orf72 GTCN PAM targeting sequence
  source 1..20: mol_type = other RNA
tatcattcactctgacaatc

SEQ ID NO: 14919 - RNA, 20 nt, synthetic construct
  misc_feature 1..20: note = C9Orf72 GTCN PAM targeting sequence
  source 1..20: mol_type = other RNA
gagtgaatgatatgacatgt

SEQ ID NO: 14920 - RNA, 20 nt, synthetic construct
  misc_feature 1..20: note = C9Orf72 GTCN PAM targeting sequence
  source 1..20: mol_type = other RNA
ctgtgtaagacatcttgaaa

SEQ ID NO: 14921 - RNA, 20 nt, synthetic construct
  misc_feature 1..20: note = C9Orf72 GTCN PAM targeting sequence
  source 1..20: mol_type = other RNA
tacacagagacactctagtg

SEQ ID NO: 14922 - RNA, 20 nt, synthetic construct
  misc_feature 1..20: note = C9Orf72 GTCN PAM targeting sequence
  source 1..20: mol_type = other RNA
ccaaatatatatatctatat

SEQ ID NO: 14923 - RNA, 20 nt, synthetic construct
  misc_feature 1..20: note = C9Orf72 GTCN PAM targeting sequence
  source 1..20: mol_type = other RNA
ggctaatatgtaattttttc

SEQ ID NO: 14924 - RNA, 20 nt, synthetic construct
  misc_feature 1..20: note = C9Orf72 GTCN PAM targeting sequence
  source 1..20: mol_type = other RNA
ccagtaagggtatgtatgta

SEQ ID NO: 14925 - RNA, 20 nt, synthetic construct
  misc_feature 1..20: note = C9Orf72 GTCN PAM targeting sequence
  source 1..20: mol_type = other RNA
ctactttttttaaaagatga

SEQ ID NO: 14926 - RNA, 20 nt, synthetic construct
  misc_feature 1..20: note = C9Orf72 GTCN PAM targeting sequence
  source 1..20: mol_type = other RNA
ttgccaaggtaggtagtact

SEQ ID NO: 14927 - RNA, 20 nt, synthetic construct
  misc_feature 1..20: note = C9Orf72 GTCN PAM targeting sequence
  source 1..20: mol_type = other RNA
tgtttgtttgtgtgtttgct

SEQ ID NO: 14928 - RNA, 20 nt, synthetic construct
  misc_feature 1..20: note = C9Orf72 GTCN PAM targeting sequence
  source 1..20: mol_type = other RNA
ggtataggatgatccctacc

SEQ ID NO: 14929 - RNA, 20 nt, synthetic construct
  misc_feature 1..20: note = C9Orf72 GTCN PAM targeting sequence
  source 1..20: mol_type = other RNA
ttattgactgggcactgata

SEQ ID NO: 14930 - RNA, 20 nt, synthetic construct
  misc_feature 1..20: note = C9Orf72 GTCN PAM targeting sequence
  source 1..20: mol_type = other RNA
ataatgacgaaatgctaata

SEQ ID NO: 14931 - RNA, 20 nt, synthetic construct
  misc_feature 1..20: note = C9Orf72 GTCN PAM targeting sequence
  source 1..20: mol_type = other RNA
actcgattaaatataagcct

SEQ ID NO: 14932 - RNA, 20 nt, synthetic construct
  misc_feature 1..20: note = C9Orf72 GTCN PAM targeting sequence
  source 1..20: mol_type = other RNA
tctctgatttctttcagcag

SEQ ID NO: 14933 - RNA, 20 nt, synthetic construct
  misc_feature 1..20: note = C9Orf72 GTCN PAM targeting sequence
  source 1..20: mol_type = other RNA
cattcacaatagccgcaaaa

SEQ ID NO: 14934 - RNA, 20 nt, synthetic construct
  misc_feature 1..20: note = C9Orf72 GTCN PAM targeting sequence
  source 1..20: mol_type = other RNA
ctgcccagaaactcctaaat

SEQ ID NO: 14935 - RNA, 20 nt, synthetic construct
  misc_feature 1..20: note = C9Orf72 GTCN PAM targeting sequence
  source 1..20: mol_type = other RNA
aactatttctgtttgcaggc

SEQ ID NO: 14936 - RNA, 20 nt, synthetic construct
  misc_feature 1..20: note = C9Orf72 GTCN PAM targeting sequence
  source 1..20: mol_type = other RNA
ttctttctttctctttcctg

SEQ ID NO: 14937 - RNA, 20 nt, synthetic construct
  misc_feature 1..20: note = C9Orf72 GTCN PAM targeting sequence
  source 1..20: mol_type = other RNA
tagccagagcaatcaggaaa

SEQ ID NO: 14938 - RNA, 20 nt, synthetic construct
  misc_feature 1..20: note = C9Orf72 GTCN PAM targeting sequence
  source 1..20: mol_type = other RNA
actctcaccactccttttca

SEQ ID NO: 14939 - RNA, 20 nt, synthetic construct
  misc_feature 1..20: note = C9Orf72 GTCN PAM targeting sequence
  source 1..20: mol_type = other RNA
tgttacggttctcaaggaga

SEQ ID NO: 14940 - RNA, 20 nt, synthetic construct
  misc_feature 1..20: note = C9Orf72 GTCN PAM targeting sequence
  source 1..20: mol_type = other RNA
gtcatagatggttcttattt

SEQ ID NO: 14941 - RNA, 20 nt, synthetic construct
  misc_feature 1..20: note = C9Orf72 GTCN PAM targeting sequence
  source 1..20: mol_type = other RNA
tagatggttcttattttttt

SEQ ID NO: 14942 - RNA, 20 nt, synthetic construct
  misc_feature 1..20: note = C9Orf72 GTCN PAM targeting sequence
  source 1..20: mol_type = other RNA
caaaaaagaaaaatcacaaa

SEQ ID NO: 14943 - RNA, 20 nt, synthetic construct
  misc_feature 1..20: note = C9Orf72 GTCN PAM targeting sequence
  source 1..20: mol_type = other RNA
cactccgttgcccaggctgg

SEQ ID NO: 14944 - RNA, 20 nt, synthetic construct
  misc_feature 1..20: note = C9Orf72 GTCN PAM targeting sequence
  source 1..20: mol_type = other RNA
cagctattcaggaggttgag

SEQ ID NO: 14945 - RNA, 20 nt, synthetic construct
  misc_feature 1..20: note = C9Orf72 GTCN PAM targeting sequence
  source 1..20: mol_type = other RNA
ccataccaagctaatttttt

SEQ ID NO: 14946 - RNA, 20 nt, synthetic construct
  misc_feature 1..20: note = C9Orf72 GTCN PAM targeting sequence
  source 1..20: mol_type = other RNA
tgaactcctgggcttaagag

SEQ ID NO: 14947 - RNA, 20 nt, synthetic construct
  misc_feature 1..20: note = C9Orf72 GTCN PAM targeting sequence
  source 1..20: mol_type = other RNA
ctacacctgacctactgaag

SEQ ID NO: 14948 - RNA, 20 nt, synthetic construct
  misc_feature 1..20: note = C9Orf72 GTCN PAM targeting sequence
  source 1..20: mol_type = other RNA
ggtgtagtgactcacacctg

SEQ ID NO: 14949 - RNA, 20 nt, synthetic construct
  misc_feature 1..20: note = C9Orf72 GTCN PAM targeting sequence
  source 1..20: mol_type = other RNA
ataaaatttaacatcctcca

SEQ ID NO: 14950 - RNA, 20 nt, synthetic construct
  misc_feature 1..20: note = C9Orf72 GTCN PAM targeting sequence
  source 1..20: mol_type = other RNA
ctgccaggttttggtatcag

SEQ ID NO: 14951 - RNA, 20 nt, synthetic construct
  misc_feature 1..20: note = C9Orf72 GTCN PAM targeting sequence
  source 1..20: mol_type = other RNA
tctctttatacctgatgtat

SEQ ID NO: 14952 - RNA, 20 nt, synthetic construct
  misc_feature 1..20: note = C9Orf72 GTCN PAM targeting sequence
  source 1..20: mol_type = other RNA
atattaattttaaaacagtt

SEQ ID NO: 14953 - RNA, 20 nt, synthetic construct
  misc_feature 1..20: note = C9Orf72 GTCN PAM targeting sequence
  source 1..20: mol_type = other RNA
gtttttataacagtaccctg

SEQ ID NO: 14954 - RNA, 20 nt, synthetic construct
  misc_feature 1..20: note = C9Orf72 GTCN PAM targeting sequence
  source 1..20: mol_type = other RNA
atgtgtctgtttttataaca

SEQ ID NO: 14955 - RNA, 20 nt, synthetic construct
  misc_feature 1..20: note = C9Orf72 GTCN PAM targeting sequence
  source 1..20: mol_type = other RNA
actttgttgaagatcagatg

SEQ ID NO: 14956 - RNA, 20 nt, synthetic construct
  misc_feature 1..20: note = C9Orf72 GTCN PAM targeting sequence
  source 1..20: mol_type = other RNA
tttccccattgcttgttttt

SEQ ID NO: 14957 - RNA, 20 nt, synthetic construct
  misc_feature 1..20: note = C9Orf72 GTCN PAM targeting sequence
  source 1..20: mol_type = other RNA
agtttcactccaattcctat

SEQ ID NO: 14958 - RNA, 20 nt, synthetic construct
  misc_feature 1..20: note = C9Orf72 GTCN PAM targeting sequence
  source 1..20: mol_type = other RNA
ttaatccatcttgagttgat

SEQ ID NO: 14959 - RNA, 20 nt, synthetic construct
  misc_feature 1..20: note = C9Orf72 GTCN PAM targeting sequence
  source 1..20: mol_type = other RNA
tccagggtttttacaatttt

SEQ ID NO: 14960 - RNA, 20 nt, synthetic construct
  misc_feature 1..20: note = C9Orf72 GTCN PAM targeting sequence
  source 1..20: mol_type = other RNA
agaatggtatttcctaggtt

SEQ ID NO: 14961 - RNA, 20 nt, synthetic construct
  misc_feature 1..20: note = C9Orf72 GTCN PAM targeting sequence
  source 1..20: mol_type = other RNA
tcatcataaaatctgtgcca

SEQ ID NO: 14962 - RNA, 20 nt, synthetic construct
  misc_feature 1..20: note = C9Orf72 GTCN PAM targeting sequence
  source 1..20: mol_type = other RNA
catttgtgtttgtttttgtt

SEQ ID NO: 14963 - RNA, 20 nt, synthetic construct
  misc_feature 1..20: note = C9Orf72 GTCN PAM targeting sequence
  source 1..20: mol_type = other RNA
tttactctgttgatagtttc

SEQ ID NO: 14964 - RNA, 20 nt, synthetic construct
  misc_feature 1..20: note = C9Orf72 GTCN PAM targeting sequence
  source 1..20: mol_type = other RNA
tttgcccagtttgtagtggg

SEQ ID NO: 14965 - RNA, 20 nt, synthetic construct
  misc_feature 1..20: note = C9Orf72 GTCN PAM targeting sequence
  source 1..20: mol_type = other RNA
gtatatattcttctgaaaaa

SEQ ID NO: 14966 - RNA, 20 nt, synthetic construct
  misc_feature 1..20: note = C9Orf72 GTCN PAM targeting sequence
  source 1..20: mol_type = other RNA
aaaaatcacagatgttggca

SEQ ID NO: 14967 - RNA, 20 nt, synthetic construct
  misc_feature 1..20: note = C9Orf72 GTCN PAM targeting sequence
  source 1..20: mol_type = other RNA
cgccagcagtgtataagtgt

SEQ ID NO: 14968 - RNA, 20 nt, synthetic construct
  misc_feature 1..20: note = C9Orf72 GTCN PAM targeting sequence
  source 1..20: mol_type = other RNA
ttatggtagaaaaatttgta

SEQ ID NO: 14969 - RNA, 20 nt, synthetic construct
  misc_feature 1..20: note = C9Orf72 GTCN PAM targeting sequence
  source 1..20: mol_type = other RNA
ttgttatcatgaatagtgct

SEQ ID NO: 14970 - RNA, 20 nt, synthetic construct
  misc_feature 1..20: note = C9Orf72 GTCN PAM targeting sequence
  source 1..20: mol_type = other RNA
accattgataggcatttagg

SEQ ID NO: 14971 - RNA, 20 nt, synthetic construct
  misc_feature 1..20: note = C9Orf72 GTCN PAM targeting sequence
  source 1..20: mol_type = other RNA
ttatcctaagtgaactaatc

SEQ ID NO: 14972 - RNA, 20 nt, synthetic construct
  misc_feature 1..20: note = C9Orf72 GTCN PAM targeting sequence
  source 1..20: mol_type = other RNA
atgtatactcagtgtttagc

SEQ ID NO: 14973 - RNA, 20 nt, synthetic construct
  misc_feature 1..20: note = C9Orf72 GTCN PAM targeting sequence
  source 1..20: mol_type = other RNA
tgagggtttggtgtacaggt

SEQ ID NO: 14974 - RNA, 20 nt, synthetic construct
  misc_feature 1..20: note = C9Orf72 GTCN PAM targeting sequence
  source 1..20: mol_type = other RNA
aaaaaaaaattccagtgacc

SEQ ID NO: 14975 - RNA, 20 nt, synthetic construct
  misc_feature 1..20: note = C9Orf72 GTCN PAM targeting sequence
  source 1..20: mol_type = other RNA
ctggaattttttttttgact

SEQ ID NO: 14976 - RNA, 20 nt, synthetic construct
  misc_feature 1..20: note = C9Orf72 GTCN PAM targeting sequence
  source 1..20: mol_type = other RNA
ctgccaatacatgaaaaatt

SEQ ID NO: 14977 - RNA, 20 nt, synthetic construct
  misc_feature 1..20: note = C9Orf72 GTCN PAM targeting sequence
  source 1..20: mol_type = other RNA
ttttacttttaagtatatgt

SEQ ID NO: 14978 - RNA, 20 nt, synthetic construct
  misc_feature 1..20: note = C9Orf72 GTCN PAM targeting sequence
  source 1..20: mol_type = other RNA
cagagtcattttacttttaa

SEQ ID NO: 14979 - RNA, 20 nt, synthetic construct
  misc_feature 1..20: note = C9Orf72 GTCN PAM targeting sequence
  source 1..20: mol_type = other RNA
attgtcacagagtcatttta

SEQ ID NO: 14980 - RNA, 20 nt, synthetic construct
  misc_feature 1..20: note = C9Orf72 GTCN PAM targeting sequence
  source 1..20: mol_type = other RNA
aaaaaatagtattttcagcc

SEQ ID NO: 14981 - RNA, 20 nt, synthetic construct
  misc_feature 1..20: note = C9Orf72 GTCN PAM targeting sequence
  source 1..20: mol_type = other RNA
tgatcagcaaaatgagaata

SEQ ID NO: 14982 - RNA, 20 nt, synthetic construct
  misc_feature 1..20: note = C9Orf72 GTCN PAM targeting sequence
  source 1..20: mol_type = other RNA
aactgtagtttgtcaaatca

SEQ ID NO: 14983 - RNA, 20 nt, synthetic construct
  misc_feature 1..20: note = C9Orf72 GTCN PAM targeting sequence
  source 1..20: mol_type = other RNA
aatcagcaaaacaaacatag

SEQ ID NO: 14984 - RNA, 20 nt, synthetic construct
  misc_feature 1..20: note = C9Orf72 GTCN PAM targeting sequence
  source 1..20: mol_type = other RNA
actaaaatttaccaatatat

SEQ ID NO: 14985 - RNA, 20 nt, synthetic construct
  misc_feature 1..20: note = C9Orf72 GTCN PAM targeting sequence
  source 1..20: mol_type = other RNA
gtaagtttttatatattggt

SEQ ID NO: 14986 - RNA, 20 nt, synthetic construct
  misc_feature 1..20: note = C9Orf72 GTCN PAM targeting sequence
  source 1..20: mol_type = other RNA
aactgaaattacatgtcagt

SEQ ID NO: 14987 - RNA, 20 nt, synthetic construct
  misc_feature 1..20: note = C9Orf72 GTCN PAM targeting sequence
  source 1..20: mol_type = other RNA
tatattaagtcatctttctg

SEQ ID NO: 14988 - RNA, 20 nt, synthetic construct
  misc_feature 1..20: note = C9Orf72 GTCN PAM targeting sequence
  source 1..20: mol_type = other RNA
tctttctgcaccttgagatg

SEQ ID NO: 14989 - RNA, 20 nt, synthetic construct
  misc_feature 1..20: note = C9Orf72 GTCN PAM targeting sequence
  source 1..20: mol_type = other RNA
cttgaacaagatattcctat

SEQ ID NO: 14990 - RNA, 20 nt, synthetic construct
  misc_feature 1..20: note = C9Orf72 GTCN PAM targeting sequence
  source 1..20: mol_type = other RNA
gttacctaagctcaaactga

SEQ ID NO: 14991 - RNA, 20 nt, synthetic construct
  misc_feature 1..20: note = C9Orf72 GTCN PAM targeting sequence
  source 1..20: mol_type = other RNA
ggcttatttgccccaatttt

SEQ ID NO: 14992 - RNA, 20 nt, synthetic construct
  misc_feature 1..20: note = C9Orf72 GTCN PAM targeting sequence
  source 1..20: mol_type = other RNA
aagtgtgtaaggcaatagaa

SEQ ID NO: 14993 - RNA, 20 nt, synthetic construct
  misc_feature 1..20: note = C9Orf72 GTCN PAM targeting sequence
  source 1..20: mol_type = other RNA
tatttaaaaaaaaaaaaaaa

SEQ ID NO: 14994 - RNA, 20 nt, synthetic construct
  misc_feature 1..20: note = C9Orf72 GTCN PAM targeting sequence
  source 1..20: mol_type = other RNA
cggtgttccccaggctggag

SEQ ID NO: 14995 - RNA, 20 nt, synthetic construct
  misc_feature 1..20: note = C9Orf72 GTCN PAM targeting sequence
  source 1..20: mol_type = other RNA
ggaactcctggcctcaagtg

SEQ ID NO: 14996 - RNA, 20 nt, synthetic construct
  misc_feature 1..20: note = C9Orf72 GTCN PAM targeting sequence
  source 1..20: mol_type = other RNA
atgctcaacaattaattatc

SEQ ID NO: 14997 - RNA, 20 nt, synthetic construct
  misc_feature 1..20: note = C9Orf72 GTCN PAM targeting sequence
  source 1..20: mol_type = other RNA
agaaaaaaaagacttagaat

SEQ ID NO: 14998 - RNA, 20 nt, synthetic construct
  misc_feature 1..20: note = C9Orf72 GTCN PAM targeting sequence
  source 1..20: mol_type = other RNA
tttttttcttgacatatgaa

SEQ ID NO: 14999 - RNA, 20 nt, synthetic construct
  misc_feature 1..20: note = C9Orf72 GTCN PAM targeting sequence
  source 1..20: mol_type = other RNA
attcaataactgttacataa

SEQ ID NO: 15000 - RNA, 20 nt, synthetic construct
  misc_feature 1..20: note = C9Orf72 GTCN PAM targeting sequence
  source 1..20: mol_type = other RNA
attatgtaacagttattgaa

SEQ ID NO: 15001 - RNA, 20 nt, synthetic construct
  misc_feature 1..20: note = C9Orf72 GTCN PAM targeting sequence
  source 1..20: mol_type = other RNA
ggttggccactattaagccc

SEQ ID NO: 15002 - RNA, 20 nt, synthetic construct
  misc_feature 1..20: note = C9Orf72 GTCN PAM targeting sequence
  source 1..20: mol_type = other RNA
tttacgaataaaaacaaaac

SEQ ID NO: 15003 - RNA, 20 nt, synthetic construct
  misc_feature 1..20: note = C9Orf72 GTCN PAM targeting sequence
  source 1..20: mol_type = other RNA
agcaatatgaaattgtgtct

SEQ ID NO: 15004 - RNA, 20 nt, synthetic construct
  misc_feature 1..20: note = C9Orf72 GTCN PAM targeting sequence
  source 1..20: mol_type = other RNA
gtgtagatgatcgtatcctg

SEQ ID NO: 15005 - RNA, 20 nt, synthetic construct
  misc_feature 1..20: note = C9Orf72 GTCN PAM targeting sequence
  source 1..20: mol_type = other RNA
tcttctgaagtggctctcca

SEQ ID NO: 15006 - RNA, 20 nt, synthetic construct
  misc_feature 1..20: note = C9Orf72 GTCN PAM targeting sequence
  source 1..20: mol_type = other RNA
gctcggatctcatgtatcta

SEQ ID NO: 15007 - RNA, 20 nt, synthetic construct
  misc_feature 1..20: note = C9Orf72 GTCN PAM targeting sequence
  source 1..20: mol_type = other RNA
tgaacatatttataatcagc

SEQ ID NO: 15008 - RNA, 20 nt, synthetic construct
  misc_feature 1..20: note = C9Orf72 GTCN PAM targeting sequence
  source 1..20: mol_type = other RNA
atactgtgaagcagatgcca

SEQ ID NO: 15009 - RNA, 20 nt, synthetic construct
  misc_feature 1..20: note = C9Orf72 GTCN PAM targeting sequence
  source 1..20: mol_type = other RNA
tgtatgctccatatcccacc

SEQ ID NO: 15010 - RNA, 20 nt, synthetic construct
  misc_feature 1..20: note = C9Orf72 GTCN PAM targeting sequence
  source 1..20: mol_type = other RNA
aaataaaaggaaaatttact

SEQ ID NO: 15011 - RNA, 20 nt, synthetic construct
  misc_feature 1..20: note = C9Orf72 GTCN PAM targeting sequence
  source 1..20: mol_type = other RNA
tacatgccaaacgatatgaa

SEQ ID NO: 15012 - RNA, 20 nt, synthetic construct
  misc_feature 1..20: note = C9Orf72 GTCN PAM targeting sequence
  source 1..20: mol_type = other RNA
ctgatttagcaaatccatct

SEQ ID NO: 15013 - RNA, 20 nt, synthetic construct
  misc_feature 1..20: note = C9Orf72 GTCN PAM targeting sequence
  source 1..20: mol_type = other RNA
ctaaaactttgcacacactc

SEQ ID NO: 15014 - RNA, 20 nt, synthetic construct
  misc_feature 1..20: note = C9Orf72 GTCN PAM targeting sequence
  source 1..20: mol_type = other RNA
ttctgatgttttgctattga

SEQ ID NO: 15015 - RNA, 20 nt, synthetic construct
  misc_feature 1..20: note = C9Orf72 GTCN PAM targeting sequence
  source 1..20: mol_type = other RNA
taaagaaaatacatgcaaaa

SEQ ID NO: 15016 - RNA, 20 nt, synthetic construct
  misc_feature 1..20: note = C9Orf72 GTCN PAM targeting sequence
  source 1..20: mol_type = other RNA
ttttttcccttttgcatgta

SEQ ID NO: 15017 - RNA, 20 nt, synthetic construct
  misc_feature 1..20: note = C9Orf72 GTCN PAM targeting sequence
  source 1..20: mol_type = other RNA
tttaatttcttaattattct

SEQ ID NO: 15018 - RNA, 20 nt, synthetic construct
  misc_feature 1..20: note = C9Orf72 GTCN PAM targeting sequence
  source 1..20: mol_type = other RNA
aaggtattttctggaaaact

SEQ ID NO: 15019 - RNA, 20 nt, synthetic construct
  misc_feature 1..20: note = C9Orf72 GTCN PAM targeting sequence
  source 1..20: mol_type = other RNA
ctttcagaactaaaattata

SEQ ID NO: 15020 - RNA, 20 nt, synthetic construct
  misc_feature 1..20: note = C9Orf72 GTCN PAM targeting sequence
  source 1..20: mol_type = other RNA
ctatgagacaatcacataac

SEQ ID NO: 15021 - RNA, 20 nt, synthetic construct
  misc_feature 1..20: note = C9Orf72 GTCN PAM targeting sequence
  source 1..20: mol_type = other RNA
catagtgactactttcttga

SEQ ID NO: 15022 - RNA, 20 nt, synthetic construct
  misc_feature 1..20: note = C9Orf72 GTCN PAM targeting sequence
  source 1..20: mol_type = other RNA
tgggactataattgaaataa

SEQ ID NO: 15023 - RNA, 20 nt, synthetic construct
  misc_feature 1..20: note = C9Orf72 GTCN PAM targeting sequence
  source 1..20: mol_type = other RNA
caagacgtgaagaaatagct

SEQ ID NO: 15024 - RNA, 20 nt, synthetic construct
  misc_feature 1..20: note = C9Orf72 GTCN PAM targeting sequence
  source 1..20: mol_type = other RNA
aggagcaaaacagagaaatg

SEQ ID NO: 15025 - RNA, 20 nt, synthetic construct
  misc_feature 1..20: note = C9Orf72 GTCN PAM targeting sequence
  source 1..20: mol_type = other RNA
actgtcaaggagcaaaacag

SEQ ID NO: 15026 - RNA, 20 nt, synthetic construct
  misc_feature 1..20: note = C9Orf72 GTCN PAM targeting sequence
  source 1..20: mol_type = other RNA
tgaggctagacatgtaggaa

SEQ ID NO: 15027 - RNA, 20 nt, synthetic construct
  misc_feature 1..20: note = C9Orf72 GTCN PAM targeting sequence
  source 1..20: mol_type = other RNA
agcctcaggacttttttttt

SEQ ID NO: 15028 - RNA, 20 nt, synthetic construct
  misc_feature 1..20: note = C9Orf72 GTCN PAM targeting sequence
  source 1..20: mol_type = other RNA
ctgttcctacatgtctagcc

SEQ ID NO: 15029 - RNA, 20 nt, synthetic construct
  misc_feature 1..20: note = C9Orf72 GTCN PAM targeting sequence
  source 1..20: mol_type = other RNA
tatggatttatagttagtat

SEQ ID NO: 15030 - RNA, 20 nt, synthetic construct
  misc_feature 1..20: note = C9Orf72 GTCN PAM targeting sequence
  source 1..20: mol_type = other RNA
atgtgcagaactgtgtaaag

SEQ ID NO: 15031 - RNA, 20 nt, synthetic construct
  misc_feature 1..20: note = C9Orf72 GTCN PAM targeting sequence
  source 1..20: mol_type = other RNA
gtctctgggcatgtcaatat

SEQ ID NO: 15032 - RNA, 20 nt, synthetic construct
  misc_feature 1..20: note = C9Orf72 GTCN PAM targeting sequence
  source 1..20: mol_type = other RNA
ctgggcatgtcaatatgaga

SEQ ID NO: 15033 - RNA, 20 nt, synthetic construct
  misc_feature 1..20: note = C9Orf72 GTCN PAM targeting sequence
  source 1..20: mol_type = other RNA
atatgagatacattaaatgc

SEQ ID NO: 15034 - RNA, 20 nt, synthetic construct
  misc_feature 1..20: note = C9Orf72 GTCN PAM targeting sequence
  source 1..20: mol_type = other RNA
ataaagagtctcaaaaatga

SEQ ID NO: 15035 - RNA, 20 nt, synthetic construct
  misc_feature 1..20: note = C9Orf72 GTCN PAM targeting sequence
  source 1..20: mol_type = other RNA
caaaaatgattttagaaaag

SEQ ID NO: 15036 - RNA, 20 nt, synthetic construct
  misc_feature 1..20: note = C9Orf72 GTCN PAM targeting sequence
  source 1..20: mol_type = other RNA
gggctctttgtacaaggcct

SEQ ID NO: 15037 - RNA, 20 nt, synthetic construct
  misc_feature 1..20: note = C9Orf72 GTCN PAM targeting sequence
  source 1..20: mol_type = other RNA
gaaaaaggcataatgttctg

SEQ ID NO: 15038 - RNA, 20 nt, synthetic construct
  misc_feature 1..20: note = C9Orf72 GTCN PAM targeting sequence
  source 1..20: mol_type = other RNA
gaacattatgcctttttctg

SEQ ID NO: 15039 - RNA, 20 nt, synthetic construct
  misc_feature 1..20: note = C9Orf72 GTCN PAM targeting sequence
  source 1..20: mol_type = other RNA
ttttacttcatgttttaatg

SEQ ID NO: 15040 - RNA, 20 nt, synthetic construct
  misc_feature 1..20: note = C9Orf72 GTCN PAM targeting sequence
  source 1..20: mol_type = other RNA
cctggaatccatgggatgta

SEQ ID NO: 15041 - RNA, 20 nt, synthetic construct
  misc_feature 1..20: note = C9Orf72 GTCN PAM targeting sequence
  source 1..20: mol_type = other RNA
aataaatttagaaaatgctt

SEQ ID NO: 15042 - RNA, 20 nt, synthetic construct
  misc_feature 1..20: note = C9Orf72 GTCN PAM targeting sequence
  source 1..20: mol_type = other RNA
cagtatgtagccaaatgtta

SEQ ID NO: 15043 - RNA, 20 nt, synthetic construct
  misc_feature 1..20: note = C9Orf72 GTCN PAM targeting sequence
  source 1..20: mol_type = other RNA
gcagatgatataattcacct

SEQ ID NO: 15044 - RNA, 20 nt, synthetic construct
  misc_feature 1..20: note = C9Orf72 GTCN PAM targeting sequence
  source 1..20: mol_type = other RNA
gagaaagtctgcagatgata

SEQ ID NO: 15045 - RNA, 20 nt, synthetic construct
  misc_feature 1..20: note = C9Orf72 GTCN PAM targeting sequence
  source 1..20: mol_type = other RNA
aataagtctgagaaagtctg

SEQ ID NO: 15046 - RNA, 20 nt, synthetic construct
  misc_feature 1..20: note = C9Orf72 GTCN PAM targeting sequence
  source 1..20: mol_type = other RNA
acacatgaaattcgttgtaa

SEQ ID NO: 15047 - RNA, 20 nt, synthetic construct
  misc_feature 1..20: note = C9Orf72 GTCN PAM targeting sequence
  source 1..20: mol_type = other RNA
agatcctccaaaaagaagag

SEQ ID NO: 15048 - RNA, 20 nt, synthetic construct
  misc_feature 1..20: note = C9Orf72 GTCN PAM targeting sequence
  source 1..20: mol_type = other RNA
ttgggtgggatttagaaatc

SEQ ID NO: 15049 - RNA, 20 nt, synthetic construct
  misc_feature 1..20: note = C9Orf72 GTCN PAM targeting sequence
  source 1..20: mol_type = other RNA
aatattattagaatcagatt

SEQ ID NO: 15050 - RNA, 20 nt, synthetic construct
  misc_feature 1..20: note = C9Orf72 GTCN PAM targeting sequence
  source 1..20: mol_type = other RNA
ctctgtgcaacctaaggctt

SEQ ID NO: 15051 - RNA, 20 nt, synthetic construct
  misc_feature 1..20: note = C9Orf72 GTCN PAM targeting sequence
  source 1..20: mol_type = other RNA
ctagttcgtagatgcaatat

SEQ ID NO: 15052 - RNA, 20 nt, synthetic construct
  misc_feature 1..20: note = C9Orf72 GTCN PAM targeting sequence
  source 1..20: mol_type = other RNA
ttatattgcatctacgaact

SEQ ID NO: 15053 - RNA, 20 nt, synthetic construct
  misc_feature 1..20: note = C9Orf72 GTCN PAM targeting sequence
  source 1..20: mol_type = other RNA
gtgaagaaaagtgcaaaatc

SEQ ID NO: 15054 - RNA, 20 nt, synthetic construct
  misc_feature 1..20: note = C9Orf72 GTCN PAM targeting sequence
  source 1..20: mol_type = other RNA
gaaacattactgaataaagt

SEQ ID NO: 15055 - RNA, 20 nt, synthetic construct
  misc_feature 1..20: note = C9Orf72 GTCN PAM targeting sequence
  source 1..20: mol_type = other RNA
ttgattattatactttattc

SEQ ID NO: 15056 - RNA, 20 nt, synthetic construct
  misc_feature 1..20: note = C9Orf72 GTCN PAM targeting sequence
  source 1..20: mol_type = other RNA
cttctagggagctattggga

SEQ ID NO: 15057 - RNA, 20 nt, synthetic construct
  misc_feature 1..20: note = C9Orf72 GTCN PAM targeting sequence
  source 1..20: mol_type = other RNA
tcgctttccttctaaatctg

SEQ ID NO: 15058 - RNA, 20 nt, synthetic construct
  misc_feature 1..20: note = C9Orf72 GTCN PAM targeting sequence
  source 1..20: mol_type = other RNA
tgtacttttggtagtagttc

SEQ ID NO: 15059 - RNA, 20 nt, synthetic construct
  misc_feature 1..20: note = C9Orf72 GTCN PAM targeting sequence
  source 1..20: mol_type = other RNA
gtagtgtataaatggttttg

SEQ ID NO: 15060 - RNA, 20 nt, synthetic construct
  misc_feature 1..20: note = C9Orf72 GTCN PAM targeting sequence
  source 1..20: mol_type = other RNA
tagcaatttgatgagattac

SEQ ID NO: 15061 - RNA, 20 nt, synthetic construct
  misc_feature 1..20: note = C9Orf72 GTCN PAM targeting sequence
  source 1..20: mol_type = other RNA
tttaaatggtaggttgcaat

SEQ ID NO: 15062 - RNA, 20 nt, synthetic construct
  misc_feature 1..20: note = C9Orf72 GTCN PAM targeting sequence
  source 1..20: mol_type = other RNA
taaagagtcaaatcatttgc

SEQ ID NO: 15063 - RNA, 20 nt, synthetic construct
  misc_feature 1..20: note = C9Orf72 GTCN PAM targeting sequence
  source 1..20: mol_type = other RNA
aatcatttgctagattataa

SEQ ID NO: 15064 - RNA, 20 nt, synthetic construct
  misc_feature 1..20: note = C9Orf72 GTCN PAM targeting sequence
  source 1..20: mol_type = other RNA
ctagaaaatgtaggttccta

SEQ ID NO: 15065 - RNA, 20 nt, synthetic construct
  misc_feature 1..20: note = C9Orf72 GTCN PAM targeting sequence
  source 1..20: mol_type = other RNA
gtataatatcatttaattaa

SEQ ID NO: 15066 - RNA, 20 nt, synthetic construct
  misc_feature 1..20: note = C9Orf72 GTCN PAM targeting sequence
  source 1..20: mol_type = other RNA
atttcttcagctataaaatg

SEQ ID NO: 15067 - RNA, 20 nt, synthetic construct
  misc_feature 1..20: note = C9Orf72 GTCN PAM targeting sequence
  source 1..20: mol_type = other RNA
cttaatctctctacatgtca

SEQ ID NO: 15068 - RNA, 20 nt, synthetic construct
  misc_feature 1..20: note = C9Orf72 GTCN PAM targeting sequence
  source 1..20: mol_type = other RNA
aatgggatttaaaatgatgt

SEQ ID NO: 15069 - RNA, 20 nt, synthetic construct
  misc_feature 1..20: note = C9Orf72 GTCN PAM targeting sequence
  source 1..20: mol_type = other RNA
gcctttcatacatcatttta

SEQ ID NO: 15070 - RNA, 20 nt, synthetic construct
  misc_feature 1..20: note = C9Orf72 GTCN PAM targeting sequence
  source 1..20: mol_type = other RNA
tgtatctgttcagtgtcagc

SEQ ID NO: 15071 - RNA, 20 nt, synthetic construct
  misc_feature 1..20: note = C9Orf72 GTCN PAM targeting sequence
  source 1..20: mol_type = other RNA
tttcctttaggctcatgatg

SEQ ID NO: 15072 - RNA, 20 nt, synthetic construct
  misc_feature 1..20: note = C9Orf72 GTCN PAM targeting sequence
  source 1..20: mol_type = other RNA
ggtttaagggcacaaactct

SEQ ID NO: 15073 - RNA, 20 nt, synthetic construct
  misc_feature 1..20: note = C9Orf72 GTCN PAM targeting sequence
  source 1..20: mol_type = other RNA
gggatggaaactcggtttct

SEQ ID NO: 15074 - RNA, 20 nt, synthetic construct
  misc_feature 1..20: note = C9Orf72 GTCN PAM targeting sequence
  source 1..20: mol_type = other RNA
ctagaacaatctaagtagac

SEQ ID NO: 15075 - RNA, 20 nt, synthetic construct
  misc_feature 1..20: note = C9Orf72 GTCN PAM targeting sequence
  source 1..20: mol_type = other RNA
acttagattgttctagggac

SEQ ID NO: 15076 - RNA, 20 nt, synthetic construct
  misc_feature 1..20: note = C9Orf72 GTCN PAM targeting sequence
  source 1..20: mol_type = other RNA
gttattttctttcttccaaa

SEQ ID NO: 15077 - RNA, 20 nt, synthetic construct
  misc_feature 1..20: note = C9Orf72 GTCN PAM targeting sequence
  source 1..20: mol_type = other RNA
taggtgagcataagatggta

SEQ ID NO: 15078 - RNA, 20 nt, synthetic construct
  misc_feature 1..20: note = C9Orf72 GTCN PAM targeting sequence
  source 1..20: mol_type = other RNA
tgaaggctttcttctcaagt

SEQ ID NO: 15079 - RNA, 20 nt, synthetic construct
  misc_feature 1..20: note = C9Orf72 GTCN PAM targeting sequence
  source 1..20: mol_type = other RNA
ccaatatcatcatcattgag

SEQ ID NO: 15080 - RNA, 20 nt, synthetic construct
  misc_feature 1..20: note = C9Orf72 GTCN PAM targeting sequence
  source 1..20: mol_type = other RNA
ggctgtaacatagtgttgaa

SEQ ID NO: 15081 - RNA, 20 nt, synthetic construct
  misc_feature 1..20: note = C9Orf72 GTCN PAM targeting sequence
  source 1..20: mol_type = other RNA
ggattcaatataacacactg

SEQ ID NO: 15082 - RNA, 20 nt, synthetic construct
  misc_feature 1..20: note = C9Orf72 GTCN PAM targeting sequence
  source 1..20: mol_type = other RNA
tgattctcggaaatgaaggc

SEQ ID NO: 15083 - RNA, 20 nt, synthetic construct
  misc_feature 1..20: note = C9Orf72 GTCN PAM targeting sequence
  source 1..20: mol_type = other RNA
agcaggttaaacaattttta

SEQ ID NO: 15084 - RNA, 20 nt, synthetic construct
  misc_feature 1..20: note = C9Orf72 GTCN PAM targeting sequence
  source 1..20: mol_type = other RNA
gaatcaggagactaacctaa

SEQ ID NO: 15085 - RNA, 20 nt, synthetic construct
  misc_feature 1..20: note = C9Orf72 GTCN PAM targeting sequence
  source 1..20: mol_type = other RNA
cctgattctgacagctcaga

SEQ ID NO: 15086 - RNA, 20 nt, synthetic construct
  misc_feature 1..20: note = C9Orf72 GTCN PAM targeting sequence
  source 1..20: mol_type = other RNA
tttaggttagtctcctgatt

SEQ ID NO: 15087 - RNA, 20 nt, synthetic construct
  misc_feature 1..20: note = C9Orf72 GTCN PAM targeting sequence
  source 1..20: mol_type = other RNA
tcaacaaatgattaaggaaa

SEQ ID NO: 15088 - RNA, 20 nt, synthetic construct
  misc_feature 1..20: note = C9Orf72 GTCN PAM targeting sequence
  source 1..20: mol_type = other RNA
caaatttagtttccttaatc

SEQ ID NO: 15089 - RNA, 20 nt, synthetic construct
  misc_feature 1..20: note = C9Orf72 GTCN PAM targeting sequence
  source 1..20: mol_type = other RNA
tttgaaacaaaactgtgtgc

SEQ ID NO: 15090 - RNA, 20 nt, synthetic construct
  misc_feature 1..20: note = C9Orf72 GTCN PAM targeting sequence
  source 1..20: mol_type = other RNA
tcactgatcaaaaatgcctc

SEQ ID NO: 15091 - RNA, 20 nt, synthetic construct
  misc_feature 1..20: note = C9Orf72 GTCN PAM targeting sequence
  source 1..20: mol_type = other RNA
tacatactattcacatacag

SEQ ID NO: 15092 - RNA, 20 nt, synthetic construct
  misc_feature 1..20: note = C9Orf72 GTCN PAM targeting sequence
  source 1..20: mol_type = other RNA
ttactattaaaattagaata

SEQ ID NO: 15093 - RNA, 20 nt, synthetic construct
  misc_feature 1..20: note = C9Orf72 GTCN PAM targeting sequence
  source 1..20: mol_type = other RNA
gagtattattccaatgctta

SEQ ID NO: 15094 - RNA, 20 nt, synthetic construct
  misc_feature 1..20: note = C9Orf72 GTCN PAM targeting sequence
  source 1..20: mol_type = other RNA
ctttattgtgcagggtcaga

SEQ ID NO: 15095 - RNA, 20 nt, synthetic construct
  misc_feature 1..20: note = C9Orf72 GTCN PAM targeting sequence
  source 1..20: mol_type = other RNA
actacatgtctaaaggattt

SEQ ID NO: 15096 - RNA, 20 nt, synthetic construct
  misc_feature 1..20: note = C9Orf72 GTCN PAM targeting sequence
  source 1..20: mol_type = other RNA
aaaggatttatatgcaatcc

SEQ ID NO: 15097 - RNA, 20 nt, synthetic construct
  misc_feature 1..20: note = C9Orf72 GTCN PAM targeting sequence
  source 1..20: mol_type = other RNA
cttgaacctgggaggagagg

SEQ ID NO: 15098 - RNA, 20 nt, synthetic construct
  misc_feature 1..20: note = C9Orf72 GTCN PAM targeting sequence
  source 1..20: mol_type = other RNA
catcctcccaagtagctggg

SEQ ID NO: 15099 - RNA, 20 nt, synthetic construct
  misc_feature 1..20: note = C9Orf72 GTCN PAM targeting sequence
  source 1..20: mol_type = other RNA
cagctacttgggaggatgag

SEQ ID NO: 15100 - RNA, 20 nt, synthetic construct
  misc_feature 1..20: note = C9Orf72 GTCN PAM targeting sequence
  source 1..20: mol_type = other RNA
ctactaaaaatacaaaaatc

SEQ ID NO: 15101 - RNA, 20 nt, synthetic construct
  misc_feature 1..20: note = C9Orf72 GTCN PAM targeting sequence
  source 1..20: mol_type = other RNA
aatttctgaccatgcccggc

SEQ ID NO: 15102 - RNA, 20 nt, synthetic construct
  misc_feature 1..20: note = C9Orf72 GTCN PAM targeting sequence
  source 1..20: mol_type = other RNA
gaaatttgacaccaacctgg

SEQ ID NO: 15103 - RNA, 20 nt, synthetic construct
  misc_feature 1..20: note = C9Orf72 GTCN PAM targeting sequence
  source 1..20: mol_type = other RNA
tcatgcctcttttagaaaag

SEQ ID NO: 15104 - RNA, 20 nt, synthetic construct
  misc_feature 1..20: note = C9Orf72 GTCN PAM targeting sequence
  source 1..20: mol_type = other RNA
tcaatatatttcatatttaa

SEQ ID NO: 15105 - RNA, 20 nt, synthetic construct
  misc_feature 1..20: note = C9Orf72 GTCN PAM targeting sequence
  source 1..20: mol_type = other RNA
ttttgtgcttggttttcctc

SEQ ID NO: 15106 - RNA, 20 nt, synthetic construct
  misc_feature 1..20: note = C9Orf72 GTCN PAM targeting sequence
  source 1..20: mol_type = other RNA
atagaatcaaactgaaaatt

SEQ ID NO: 15107 - RNA, 20 nt, synthetic construct
  misc_feature 1..20: note = C9Orf72 GTCN PAM targeting sequence
  source 1..20: mol_type = other RNA
caaatatggatggtccctca

SEQ ID NO: 15108 - RNA, 20 nt, synthetic construct
  misc_feature 1..20: note = C9Orf72 GTCN PAM targeting sequence
  source 1..20: mol_type = other RNA
ctcatttattcactaccacc

SEQ ID NO: 15109 - RNA, 20 nt, synthetic construct
  misc_feature 1..20: note = C9Orf72 GTCN PAM targeting sequence
  source 1..20: mol_type = other RNA
catcagttttgtgaccaact

SEQ ID NO: 15110 - RNA, 20 nt, synthetic construct
  misc_feature 1..20: note = C9Orf72 GTCN PAM targeting sequence
  source 1..20: mol_type = other RNA
caaaactgatgagactggtg

SEQ ID NO: 15111 - RNA, 20 nt, synthetic construct
  misc_feature 1..20: note = C9Orf72 GTCN PAM targeting sequence
  source 1..20: mol_type = other RNA
aatgactatgcatttttagc

SEQ ID NO: 15112 - RNA, 20 nt, synthetic construct
  misc_feature 1..20: note = C9Orf72 GTCN PAM targeting sequence
  source 1..20: mol_type = other RNA
tttgacaatttcatttatat

SEQ ID NO: 15113 - RNA, 20 nt, synthetic construct
  misc_feature 1..20: note = C9Orf72 GTCN PAM targeting sequence
  source 1..20: mol_type = other RNA
tcataagcatctttaagtta

SEQ ID NO: 15114 - RNA, 20 nt, synthetic construct
  misc_feature 1..20: note = C9Orf72 GTCN PAM targeting sequence
  source 1..20: mol_type = other RNA
gacccagggccatttttgga

SEQ ID NO: 15115 - RNA, 20 nt, synthetic construct
  misc_feature 1..20: note = C9Orf72 GTCN PAM targeting sequence
  source 1..20: mol_type = other RNA
gacaaagattctaacttaaa

SEQ ID NO: 15116 - RNA, 20 nt, synthetic construct
  misc_feature 1..20: note = C9Orf72 GTCN PAM targeting sequence
  source 1..20: mol_type = other RNA
ttattcttgttagattgaat

SEQ ID NO: 15117 - RNA, 20 nt, synthetic construct
  misc_feature 1..20: note = C9Orf72 GTCN PAM targeting sequence
  source 1..20: mol_type = other RNA
tctgataaaattgcttcaca

SEQ ID NO: 15118 - RNA, 20 nt, synthetic construct
  misc_feature 1..20: note = C9Orf72 GTCN PAM targeting sequence
  source 1..20: mol_type = other RNA
ttgtgagatttgcaagaact

SEQ ID NO: 15119 - RNA, 20 nt, synthetic construct
  misc_feature 1..20: note = C9Orf72 GTCN PAM targeting sequence
  source 1..20: mol_type = other RNA
gagatactgtgaatgaaata

SEQ ID NO: 15120 - RNA, 20 nt, synthetic construct
  misc_feature 1..20: note = C9Orf72 GTCN PAM targeting sequence
  source 1..20: mol_type = other RNA
ctcttttaagtgctcttctt

SEQ ID NO: 15121 - RNA, 20 nt, synthetic construct
  misc_feature 1..20: note = C9Orf72 GTCN PAM targeting sequence
  source 1..20: mol_type = other RNA
acttaagtaaaggtttctgg

SEQ ID NO: 15122 - RNA, 20 nt, synthetic construct
  misc_feature 1..20: note = C9Orf72 GTCN PAM targeting sequence
  source 1..20: mol_type = other RNA
actaataactagtgggttag

SEQ ID NO: 15123 - RNA, 20 nt, synthetic construct
  misc_feature 1..20: note = C9Orf72 GTCN PAM targeting sequence
  source 1..20: mol_type = other RNA
ccaggaatggggtaactttc

SEQ ID NO: 15124 - RNA, 20 nt, synthetic construct
  misc_feature 1..20: note = C9Orf72 GTCN PAM targeting sequence
  source 1..20: mol_type = other RNA
ataagcagggtccccaggaa

SEQ ID NO: 15125 - RNA, 20 nt, synthetic construct
  misc_feature 1..20: note = C9Orf72 GTCN PAM targeting sequence
  source 1..20: mol_type = other RNA
ttatttgctggtcaataagc

SEQ ID NO: 15126 - RNA, 20 nt, synthetic construct
  misc_feature 1..20: note = C9Orf72 GTCN PAM targeting sequence
  source 1..20: mol_type = other RNA
gacctttacacagaataact

SEQ ID NO: 15127 - RNA, 20 nt, synthetic construct
  misc_feature 1..20: note = C9Orf72 GTCN PAM targeting sequence
  source 1..20: mol_type = other RNA
gacttaacaagaaaagattt

SEQ ID NO: 15128 - RNA, 20 nt, synthetic construct
  misc_feature 1..20: note = C9Orf72 GTCN PAM targeting sequence
  source 1..20: mol_type = other RNA
ctgaattggaaagctatcta

SEQ ID NO: 15129 - RNA, 20 nt, synthetic construct
  misc_feature 1..20: note = C9Orf72 GTCN PAM targeting sequence
  source 1..20: mol_type = other RNA
cattcatgctaaaaagaagc

SEQ ID NO: 15130 - RNA, 20 nt, synthetic construct
  misc_feature 1..20: note = C9Orf72 GTCN PAM targeting sequence
  source 1..20: mol_type = other RNA
cccacaagaggaaatggaag

SEQ ID NO: 15131 - RNA, 20 nt, synthetic construct
  misc_feature 1..20: note = C9Orf72 GTCN PAM targeting sequence
  source 1..20: mol_type = other RNA
gtacttagtttccgcagggg

SEQ ID NO: 15132 - RNA, 20 nt, synthetic construct
  misc_feature 1..20: note = C9Orf72 GTCN PAM targeting sequence
  source 1..20: mol_type = other RNA
gttcctgaggggcattcaaa

SEQ ID NO: 15133 - RNA, 20 nt, synthetic construct
  misc_feature 1..20: note = C9Orf72 GTCN PAM targeting sequence
  source 1..20: mol_type = other RNA
gtgatatttcttaccctctc

SEQ ID NO: 15134 - RNA, 20 nt, synthetic construct
  misc_feature 1..20: note = C9Orf72 GTCN PAM targeting sequence
  source 1..20: mol_type = other RNA
taacgatacaacataagact

SEQ ID NO: 15135 - RNA, 20 nt, synthetic construct
  misc_feature 1..20: note = C9Orf72 GTCN PAM targeting sequence
  source 1..20: mol_type = other RNA
tatgttgtatcgttaagact

SEQ ID NO: 15136 - RNA, 20 nt, synthetic construct
  misc_feature 1..20: note = C9Orf72 GTCN PAM targeting sequence
  source 1..20: mol_type = other RNA
acacaatatttcttctaagt

SEQ ID NO: 15137 - RNA, 20 nt, synthetic construct
  misc_feature 1..20: note = C9Orf72 GTCN PAM targeting sequence
  source 1..20: mol_type = other RNA
ggggtgtaggcccaggtcca

SEQ ID NO: 15138 - RNA, 20 nt, synthetic construct
  misc_feature 1..20: note = C9Orf72 GTCN PAM targeting sequence
  source 1..20: mol_type = other RNA
ctgatatgttctttaaggta

SEQ ID NO: 15139 - RNA, 20 nt, synthetic construct
  misc_feature 1..20: note = C9Orf72 GTCN PAM targeting sequence
  source 1..20: mol_type = other RNA
ccaaggccttgacaaatgta

SEQ ID NO: 15140 - RNA, 20 nt, synthetic construct
  misc_feature 1..20: note = C9Orf72 GTCN PAM targeting sequence
  source 1..20: mol_type = other RNA
aggccttggagacatacgaa

SEQ ID NO: 15141 - RNA, 20 nt, synthetic construct
  misc_feature 1..20: note = C9Orf72 GTCN PAM targeting sequence
  source 1..20: mol_type = other RNA
aatgtttttctcacagcatg

SEQ ID NO: 15142 - RNA, 20 nt, synthetic construct
  misc_feature 1..20: note = C9Orf72 GTCN PAM targeting sequence
  source 1..20: mol_type = other RNA
agaagattatcttagaaggc

SEQ ID NO: 15143 - RNA, 20 nt, synthetic construct
  misc_feature 1..20: note = C9Orf72 GTCN PAM targeting sequence
  source 1..20: mol_type = other RNA
ttcctgagcaagagaaaatt

SEQ ID NO: 15144 - RNA, 20 nt, synthetic construct
  misc_feature 1..20: note = C9Orf72 GTCN PAM targeting sequence
  source 1..20: mol_type = other RNA
attgaaaaataagcaagtat

SEQ ID NO: 15145 - RNA, 20 nt, synthetic construct
  misc_feature 1..20: note = C9Orf72 GTCN PAM targeting sequence
  source 1..20: mol_type = other RNA
atgtaacatctgcatagttt

SEQ ID NO: 15146 - RNA, 20 nt, synthetic construct
  misc_feature 1..20: note = C9Orf72 GTCN PAM targeting sequence
  source 1..20: mol_type = other RNA
ttcttttcctttttgaaact

SEQ ID NO: 15147 - RNA, 20 nt, synthetic construct
  misc_feature 1..20: note = C9Orf72 GTCN PAM targeting sequence
  source 1..20: mol_type = other RNA
attaagcattaccagtttta

SEQ ID NO: 15148 - RNA, 20 nt, synthetic construct
  misc_feature 1..20: note = C9Orf72 GTCN PAM targeting sequence
  source 1..20: mol_type = other RNA
ctttaacctctttgccaagt

SEQ ID NO: 15149 - RNA, 20 nt, synthetic construct
  misc_feature 1..20: note = C9Orf72 GTCN PAM targeting sequence
  source 1..20: mol_type = other RNA
tgtagcctttggtctcttta

SEQ ID NO: 15150 - RNA, 20 nt, synthetic construct
  misc_feature 1..20: note = C9Orf72 GTCN PAM targeting sequence
  source 1..20: mol_type = other RNA
tttgcttactactatgtgta

SEQ ID NO: 15151 - RNA, 20 nt, synthetic construct
  misc_feature 1..20: note = C9Orf72 GTCN PAM targeting sequence
  source 1..20: mol_type = other RNA
aaggctcccaagaagaatcc

SEQ ID NO: 15152 - RNA, 20 nt, synthetic construct
  misc_feature 1..20: note = C9Orf72 GTCN PAM targeting sequence
  source 1..20: mol_type = other RNA
aaaagtttctttatttgtct

SEQ ID NO: 15153 - RNA, 20 nt, synthetic construct
  misc_feature 1..20: note = C9Orf72 GTCN PAM targeting sequence
  source 1..20: mol_type = other RNA
aagctttagcttttcatcta

SEQ ID NO: 15154 - RNA, 20 nt, synthetic construct
  misc_feature 1..20: note = C9Orf72 GTCN PAM targeting sequence
  source 1..20: mol_type = other RNA
tcttcatattaactgtggaa

SEQ ID NO: 15155 - RNA, 20 nt, synthetic construct
  misc_feature 1..20: note = C9Orf72 GTCN PAM targeting sequence
  source 1..20: mol_type = other RNA
gatacctgtcatcttcatat

SEQ ID NO: 15156 - RNA, 20 nt, synthetic construct
  misc_feature 1..20: note = C9Orf72 GTCN PAM targeting sequence
  source 1..20: mol_type = other RNA
gtggaagtataattgatagt

SEQ ID NO: 15157 - RNA, 20 nt, synthetic construct
  misc_feature 1..20: note = C9Orf72 GTCN PAM targeting sequence
  source 1..20: mol_type = other RNA
atatgtgctgcgatccccat

SEQ ID NO: 15158 - RNA, 20 nt, synthetic construct
  misc_feature 1..20: note = C9Orf72 GTCN PAM targeting sequence
  source 1..20: mol_type = other RNA
gaaaagggagtgattattgt

SEQ ID NO: 15159 - RNA, 20 nt, synthetic construct
  misc_feature 1..20: note = C9Orf72 GTCN PAM targeting sequence
  source 1..20: mol_type = other RNA
tgtctgaaaagggagtgatt

SEQ ID NO: 15160 - RNA, 20 nt, synthetic construct
  misc_feature 1..20: note = C9Orf72 GTCN PAM targeting sequence
  source 1..20: mol_type = other RNA
ttggagcccaaatgtgcctt

SEQ ID NO: 15161 - RNA, 20 nt, synthetic construct
  misc_feature 1..20: note = C9Orf72 GTCN PAM targeting sequence
  source 1..20: mol_type = other RNA
tagagtaaggcacatttggg

SEQ ID NO: 15162 - RNA, 20 nt, synthetic construct
  misc_feature 1..20: note = C9Orf72 GTCN PAM targeting sequence
  source 1..20: mol_type = other RNA
cagtaagcaaaagtagctgc

SEQ ID NO: 15163 - RNA, 20 nt, synthetic construct
  misc_feature 1..20: note = C9Orf72 GTCN PAM targeting sequence
  source 1..20: mol_type = other RNA
tggcaacagctggagatggc

SEQ ID NO: 15164 - RNA, 20 nt, synthetic construct
  misc_feature 1..20: note = C9Orf72 GTCN PAM targeting sequence
  source 1..20: mol_type = other RNA
acatcactgcattccaactg

SEQ ID NO: 15165 - RNA, 20 nt, synthetic construct
  misc_feature 1..20: note = C9Orf72 GTCN PAM targeting sequence
  source 1..20: mol_type = other RNA
actctttgcccaccgccatc

SEQ ID NO: 15166 - RNA, 20 nt, synthetic construct
  misc_feature 1..20: note = C9Orf72 GTCN PAM targeting sequence
  source 1..20: mol_type = other RNA
cattatccaaatgctccgga

SEQ ID NO: 15167 - RNA, 20 nt, synthetic construct
  misc_feature 1..20: note = C9Orf72 GTCN PAM targeting sequence
  source 1..20: mol_type = other RNA
ttgtttagatatctccggag

SEQ ID NO: 15168 - RNA, 20 nt, synthetic construct
  misc_feature 1..20: note = C9Orf72 GTCN PAM targeting sequence
  source 1..20: mol_type = other RNA
aaatcatttggggttttgat

SEQ ID NO: 15169 - RNA, 20 nt, synthetic construct
  misc_feature 1..20: note = C9Orf72 GTCN PAM targeting sequence
  source 1..20: mol_type = other RNA
tcttaagtcaaagatgtgga

SEQ ID NO: 15170 - RNA, 20 nt, synthetic construct
  misc_feature 1..20: note = C9Orf72 GTCN PAM targeting sequence
  source 1..20: mol_type = other RNA
aagatgtggaatcctgttat

SEQ ID NO: 15171 - RNA, 20 nt, synthetic construct
  misc_feature 1..20: note = C9Orf72 GTCN PAM targeting sequence
  source 1..20: mol_type = other RNA
ttatcctgataggagataac

SEQ ID NO: 15172 - RNA, 20 nt, synthetic construct
  misc_feature 1..20: note = C9Orf72 GTCN PAM targeting sequence
  source 1..20: mol_type = other RNA
tgtaaaatgatcatatcaac

SEQ ID NO: 15173 - RNA, 20 nt, synthetic construct
  misc_feature 1..20: note = C9Orf72 GTCN PAM targeting sequence
  source 1..20: mol_type = other RNA
attctatgagctttagtatg

SEQ ID NO: 15174 - RNA, 20 nt, synthetic construct
  misc_feature 1..20: note = C9Orf72 GTCN PAM targeting sequence
  source 1..20: mol_type = other RNA
atgtgcaattctagtatgac

SEQ ID NO: 15175 - RNA, 20 nt, synthetic construct
  misc_feature 1..20: note = C9Orf72 GTCN PAM targeting sequence
  source 1..20: mol_type = other RNA
tactagaattgcacatggac

SEQ ID NO: 15176 - RNA, 20 nt, synthetic construct
  misc_feature 1..20: note = C9Orf72 GTCN PAM targeting sequence
  source 1..20: mol_type = other RNA
ctagctgagcctttcccttc

SEQ ID NO: 15177 - RNA, 20 nt, synthetic construct
  misc_feature 1..20: note = C9Orf72 GTCN PAM targeting sequence
  source 1..20: mol_type = other RNA
gtctctagctgagcctttcc

SEQ ID NO: 15178 - RNA, 20 nt, synthetic construct
  misc_feature 1..20: note = C9Orf72 GTCN PAM targeting sequence
  source 1..20: mol_type = other RNA
cccaaaaagatatgttcaat

SEQ ID NO: 15179 - RNA, 20 nt, synthetic construct
  misc_feature 1..20: note = C9Orf72 GTCN PAM targeting sequence
  source 1..20: mol_type = other RNA
cattcacgtacaccaagggt

SEQ ID NO: 15180 - RNA, 20 nt, synthetic construct
  misc_feature 1..20: note = C9Orf72 GTCN PAM targeting sequence
  source 1..20: mol_type = other RNA
tactggattagagtggggcc

SEQ ID NO: 15181 - RNA, 20 nt, synthetic construct
  misc_feature 1..20: note = C9Orf72 GTCN PAM targeting sequence
  source 1..20: mol_type = other RNA
ccaaatctctctccttataa

SEQ ID NO: 15182 - RNA, 20 nt, synthetic construct
  misc_feature 1..20: note = C9Orf72 GTCN PAM targeting sequence
  source 1..20: mol_type = other RNA
ctgtgtctccaaatctctct

SEQ ID NO: 15183 - RNA, 20 nt, synthetic construct
  misc_feature 1..20: note = C9Orf72 GTCN PAM targeting sequence
  source 1..20: mol_type = other RNA
accatttgtctctgtgtctc

SEQ ID NO: 15184 - RNA, 20 nt, synthetic construct
  misc_feature 1..20: note = C9Orf72 GTCN PAM targeting sequence
  source 1..20: mol_type = other RNA
tcacatggctgtctaccatt

SEQ ID NO: 15185 - RNA, 20 nt, synthetic construct
  misc_feature 1..20: note = C9Orf72 GTCN PAM targeting sequence
  source 1..20: mol_type = other RNA
tctctcttgaagatcatgcc

SEQ ID NO: 15186 - RNA, 20 nt, synthetic construct
  misc_feature 1..20: note = C9Orf72 GTCN PAM targeting sequence
  source 1..20: mol_type = other RNA
acactttgatttcggacttc

SEQ ID NO: 15187 - RNA, 20 nt, synthetic construct
  misc_feature 1..20: note = C9Orf72 GTCN PAM targeting sequence
  source 1..20: mol_type = other RNA
gaaatcaaagtgttgacagg

SEQ ID NO: 15188 - RNA, 20 nt, synthetic construct
  misc_feature 1..20: note = C9Orf72 GTCN PAM targeting sequence
  source 1..20: mol_type = other RNA
aaaaaaaaaaaaaaaaaaaa

SEQ ID NO: 15189 - RNA, 20 nt, synthetic construct
  misc_feature 1..20: note = C9Orf72 GTCN PAM targeting sequence
  source 1..20: mol_type = other RNA
tttttttttttttttttttt

SEQ ID NO: 15190 - RNA, 20 nt, synthetic construct
  misc_feature 1..20: note = C9Orf72 GTCN PAM targeting sequence
  source 1..20: mol_type = other RNA
ggagccataacaaaaaatgg

SEQ ID NO: 15191 - RNA, 20 nt, synthetic construct
  misc_feature 1..20: note = C9Orf72 GTCN PAM targeting sequence
  source 1..20: mol_type = other RNA
tgtatcctcagtgaactctc

SEQ ID NO: 15192 - RNA, 20 nt, synthetic construct
  misc_feature 1..20: note = C9Orf72 GTCN PAM targeting sequence
  source 1..20: mol_type = other RNA
ttttaaacatcaggatcggg

SEQ ID NO: 15193 - RNA, 20 nt, synthetic construct
  misc_feature 1..20: note = C9Orf72 GTCN PAM targeting sequence
  source 1..20: mol_type = other RNA
tgatacttcaatgtcgtttt

SEQ ID NO: 15194 - RNA, 20 nt, synthetic construct
  misc_feature 1..20: note = C9Orf72 GTCN PAM targeting sequence
  source 1..20: mol_type = other RNA
gttttctcattaaattcaaa

SEQ ID NO: 15195 - RNA, 20 nt, synthetic construct
  misc_feature 1..20: note = C9Orf72 GTCN PAM targeting sequence
  source 1..20: mol_type = other RNA
tggatgtgagcgtttatgtt

SEQ ID NO: 15196 - RNA, 20 nt, synthetic construct
  misc_feature 1..20: note = C9Orf72 GTCN PAM targeting sequence
  source 1..20: mol_type = other RNA
ccttgctcaacttgtacatc

SEQ ID NO: 15197 - RNA, 20 nt, synthetic construct
  misc_feature 1..20: note = C9Orf72 GTCN PAM targeting sequence
  source 1..20: mol_type = other RNA
atggtagactgcatatatga

SEQ ID NO: 15198 - RNA, 20 nt, synthetic construct
  misc_feature 1..20: note = C9Orf72 GTCN PAM targeting sequence
  source 1..20: mol_type = other RNA
accattgactgaaacgttac

SEQ ID NO: 15199 - RNA, 20 nt, synthetic construct
  misc_feature 1..20: note = C9Orf72 GTCN PAM targeting sequence
  source 1..20: mol_type = other RNA
cattagattacaatggacct

SEQ ID NO: 15200 - RNA, 20 nt, synthetic construct
  misc_feature 1..20: note = C9Orf72 GTCN PAM targeting sequence
  source 1..20: mol_type = other RNA
attgtaatctaatgggacta

SEQ ID NO: 15201 - RNA, 20 nt, synthetic construct
  misc_feature 1..20: note = C9Orf72 GTCN PAM targeting sequence
  source 1..20: mol_type = other RNA
ctaaggcaatagcatatttt

SEQ ID NO: 15202 - RNA, 20 nt, synthetic construct
  misc_feature 1..20: note = C9Orf72 GTCN PAM targeting sequence
  source 1..20: mol_type = other RNA
tagtactattttgcaagtta

SEQ ID NO: 15203 - RNA, 20 nt, synthetic construct
  misc_feature 1..20: note = C9Orf72 GTCN PAM targeting sequence
  source 1..20: mol_type = other RNA
ttcaggaggtattcaacaga

SEQ ID NO: 15204 - RNA, 20 nt, synthetic construct
  misc_feature 1..20: note = C9Orf72 GTCN PAM targeting sequence
  source 1..20: mol_type = other RNA
cctatgataacagtgctttc

SEQ ID NO: 15205 - RNA, 20 nt, synthetic construct
  misc_feature 1..20: note = C9Orf72 GTCN PAM targeting sequence
  source 1..20: mol_type = other RNA
cactggaaggtttttagggg

SEQ ID NO: 15206 - RNA, 20 nt, synthetic construct
  misc_feature 1..20: note = C9Orf72 GTCN PAM targeting sequence
  source 1..20: mol_type = other RNA
atgcctaggtgaaagtgtgt

SEQ ID NO: 15207 - RNA, 20 nt, synthetic construct
  misc_feature 1..20: note = C9Orf72 GTCN PAM targeting sequence
  source 1..20: mol_type = other RNA
tttttgttaaaaactaaaac

SEQ ID NO: 15208 - RNA, 20 nt, synthetic construct
  misc_feature 1..20: note = C9Orf72 GTCN PAM targeting sequence
  source 1..20: mol_type = other RNA
acagtggtgtacagtgttct

SEQ ID NO: 15209 - RNA, 20 nt, synthetic construct
  misc_feature 1..20: note = C9Orf72 GTCN PAM targeting sequence
  source 1..20: mol_type = other RNA
gtgagtgagtggtgaattaa

SEQ ID NO: 15210 - RNA, 20 nt, synthetic construct
  misc_feature 1..20: note = C9Orf72 GTCN PAM targeting sequence
  source 1..20: mol_type = other RNA
tgcaagctccattcgtggta

SEQ ID NO: 15211 - RNA, 20 nt, synthetic construct
  misc_feature 1..20: note = C9Orf72 GTCN PAM targeting sequence
  source 1..20: mol_type = other RNA
atagtattcagtacagtaac

SEQ ID NO: 15212 - RNA, 20 nt, synthetic construct
  misc_feature 1..20: note = C9Orf72 GTCN PAM targeting sequence
  source 1..20: mol_type = other RNA
gttgctcctaggccacaaac

SEQ ID NO: 15213 - RNA, 20 nt, synthetic construct
  misc_feature 1..20: note = C9Orf72 GTCN PAM targeting sequence
  source 1..20: mol_type = other RNA
ttatgcaaacatcatagagt

SEQ ID NO: 15214 - RNA, 20 nt, synthetic construct
  misc_feature 1..20: note = C9Orf72 GTCN PAM targeting sequence
  source 1..20: mol_type = other RNA
tcaattatagtacaatcaca

SEQ ID NO: 15215 - RNA, 20 nt, synthetic construct
  misc_feature 1..20: note = C9Orf72 GTCN PAM targeting sequence
  source 1..20: mol_type = other RNA
tagataacaagtcttcaatt

SEQ ID NO: 15216 - RNA, 20 nt, synthetic construct
  misc_feature 1..20: note = C9Orf72 GTCN PAM targeting sequence
  source 1..20: mol_type = other RNA
aaaactgtgaagtctattta

SEQ ID NO: 15217 - RNA, 20 nt, synthetic construct
  misc_feature 1..20: note = C9Orf72 GTCN PAM targeting sequence
  source 1..20: mol_type = other RNA
atttataataatagcaatac

SEQ ID NO: 15218 - RNA, 20 nt, synthetic construct
  misc_feature 1..20: note = C9Orf72 GTCN PAM targeting sequence
  source 1..20: mol_type = other RNA
tacatttacagatcaaatgt

SEQ ID NO: 15219 - RNA, 20 nt, synthetic construct
  misc_feature 1..20: note = C9Orf72 GTCN PAM targeting sequence
  source 1..20: mol_type = other RNA
agagagttcagtctgatgga

SEQ ID NO: 15220 - RNA, 20 nt, synthetic construct
  misc_feature 1..20: note = C9Orf72 GTCN PAM targeting sequence
  source 1..20: mol_type = other RNA
gatggaaagcactgacttct

SEQ ID NO: 15221 - RNA, 20 nt, synthetic construct
  misc_feature 1..20: note = C9Orf72 GTCN PAM targeting sequence
  source 1..20: mol_type = other RNA
gtgctttccatcagactgaa

SEQ ID NO: 15222 - RNA, 20 nt, synthetic construct
  misc_feature 1..20: note = C9Orf72 GTCN PAM targeting sequence
  source 1..20: mol_type = other RNA
ttgtgttcaaccatttctgt

SEQ ID NO: 15223 - RNA, 20 nt, synthetic construct
  misc_feature 1..20: note = C9Orf72 GTCN PAM targeting sequence
  source 1..20: mol_type = other RNA
taagagacagcactagatat

SEQ ID NO: 15224 - RNA, 20 nt, synthetic construct
  misc_feature 1..20: note = C9Orf72 GTCN PAM targeting sequence
  source 1..20: mol_type = other RNA
cttaagactattaaattgat

SEQ ID NO: 15225 - RNA, 20 nt, synthetic construct
  misc_feature 1..20: note = C9Orf72 GTCN PAM targeting sequence
  source 1..20: mol_type = other RNA
gtttacaatgatcaaatata

SEQ ID NO: 15226 - RNA, 20 nt, synthetic construct
  misc_feature 1..20: note = C9Orf72 GTCN PAM targeting sequence
  source 1..20: mol_type = other RNA
ttaccatttcaattcagatt

SEQ ID NO: 15227 - RNA, 20 nt, synthetic construct
  misc_feature 1..20: note = C9Orf72 GTCN PAM targeting sequence
  source 1..20: mol_type = other RNA
taactaacaacagcaaactg

SEQ ID NO: 15228 - RNA, 20 nt, synthetic construct
  misc_feature 1..20: note = C9Orf72 GTCN PAM targeting sequence
  source 1..20: mol_type = other RNA
cacctgttatcccagctctt

SEQ ID NO: 15229 - RNA, 20 nt, synthetic construct
  misc_feature 1..20: note = C9Orf72 GTCN PAM targeting sequence
  source 1..20: mol_type = other RNA
ggagctcaagaccagcctgg

SEQ ID NO: 15230 - RNA, 20 nt, synthetic construct
  misc_feature 1..20: note = C9Orf72 GTCN PAM targeting sequence
  source 1..20: mol_type = other RNA
tgagctcctgacctcaggtg

SEQ ID NO: 15231 - RNA, 20 nt, synthetic construct
  misc_feature 1..20: note = C9Orf72 GTCN PAM targeting sequence
  source 1..20: mol_type = other RNA
accaccacacccggctaatt

SEQ ID NO: 15232 - RNA, 20 nt, synthetic construct
  misc_feature 1..20: note = C9Orf72 GTCN PAM targeting sequence
  source 1..20: mol_type = other RNA
cccaggctggagtgcagtgg

SEQ ID NO: 15233 - RNA, 20 nt, synthetic construct
  misc_feature 1..20: note = C9Orf72 GTCN PAM targeting sequence
  source 1..20: mol_type = other RNA
ctctctgtcgcccaggctgg

SEQ ID NO: 15234 - RNA, 20 nt, synthetic construct
  misc_feature 1..20: note = C9Orf72 GTCN PAM targeting sequence
  source 1..20: mol_type = other RNA
ttcattttctttcttattct

SEQ ID NO: 15235 - RNA, 20 nt, synthetic construct
  misc_feature 1..20: note = C9Orf72 GTCN PAM targeting sequence
  source 1..20: mol_type = other RNA
cagagaagtataatcaggag

SEQ ID NO: 15236 - RNA, 20 nt, synthetic construct
  misc_feature 1..20: note = C9Orf72 GTCN PAM targeting sequence
  source 1..20: mol_type = other RNA
tcgtctttggtgagaaaaat

SEQ ID NO: 15237 - RNA, 20 nt, synthetic construct
  misc_feature 1..20: note = C9Orf72 GTCN PAM targeting sequence
  source 1..20: mol_type = other RNA
ttggtgagaaaaatccatac

SEQ ID NO: 15238 - RNA, 20 nt, synthetic construct
  misc_feature 1..20: note = C9Orf72 GTCN PAM targeting sequence
  source 1..20: mol_type = other RNA
actccagagagttaccaaac

SEQ ID NO: 15239 - RNA, 20 nt, synthetic construct
  misc_feature 1..20: note = C9Orf72 GTCN PAM targeting sequence
  source 1..20: mol_type = other RNA
tttgagggaagccaagattc

SEQ ID NO: 15240 - RNA, 20 nt, synthetic construct
  misc_feature 1..20: note = C9Orf72 GTCN PAM targeting sequence
  source 1..20: mol_type = other RNA
cactcaatttgaatcttggc

SEQ ID NO: 15241 - RNA, 20 nt, synthetic construct
  misc_feature 1..20: note = C9Orf72 GTCN PAM targeting sequence
  source 1..20: mol_type = other RNA
gcatgtatgggattatttcc

SEQ ID NO: 15242 - RNA, 20 nt, synthetic construct
  misc_feature 1..20: note = C9Orf72 GTCN PAM targeting sequence
  source 1..20: mol_type = other RNA
gttaaaaaatcaaccatctc

SEQ ID NO: 15243 - RNA, 20 nt, synthetic construct
  misc_feature 1..20: note = C9Orf72 GTCN PAM targeting sequence
  source 1..20: mol_type = other RNA
actgctattgtagtgaaaat

SEQ ID NO: 15244 - RNA, 20 nt, synthetic construct
  misc_feature 1..20: note = C9Orf72 GTCN PAM targeting sequence
  source 1..20: mol_type = other RNA
ctaaaaaacaagaagtgagg

SEQ ID NO: 15245 - RNA, 20 nt, synthetic construct
  misc_feature 1..20: note = C9Orf72 GTCN PAM targeting sequence
  source 1..20: mol_type = other RNA
cgttttgtcatccaggctgg

SEQ ID NO: 15246 - RNA, 20 nt, synthetic construct
  misc_feature 1..20: note = C9Orf72 GTCN PAM targeting sequence
  source 1..20: mol_type = other RNA
tccaggctggaatgcactgg

SEQ ID NO: 15247 - RNA, 20 nt, synthetic construct
  misc_feature 1..20: note = C9Orf72 GTCN PAM targeting sequence
  source 1..20: mol_type = other RNA
tttgagcccaagagtttgaa

SEQ ID NO: 15248 - RNA, 20 nt, synthetic construct
  misc_feature 1..20: note = C9Orf72 GTCN PAM targeting sequence
  source 1..20: mol_type = other RNA
tagctacttgggaggctgag

SEQ ID NO: 15249 - RNA, 20 nt, synthetic construct
  misc_feature 1..20: note = C9Orf72 GTCN PAM targeting sequence
  source 1..20: mol_type = other RNA
ctacaaaaaattaaaaactt

SEQ ID NO: 15250 - RNA, 20 nt, synthetic construct
  misc_feature 1..20: note = C9Orf72 GTCN PAM targeting sequence
  source 1..20: mol_type = other RNA
acgttgcccaggttgagctt

SEQ ID NO: 15251 - RNA, 20 nt, synthetic construct
  misc_feature 1..20: note = C9Orf72 GTCN PAM targeting sequence
  source 1..20: mol_type = other RNA
actttccacaacaggagctg

SEQ ID NO: 15252 - RNA, 20 nt, synthetic construct
  misc_feature 1..20: note = C9Orf72 GTCN PAM targeting sequence
  source 1..20: mol_type = other RNA
tgggcagctcctgttgtgga

SEQ ID NO: 15253 - RNA, 20 nt, synthetic construct
  misc_feature 1..20: note = C9Orf72 GTCN PAM targeting sequence
  source 1..20: mol_type = other RNA
ttgaagtggtcctgggcagc

SEQ ID NO: 15254 - RNA, 20 nt, synthetic construct
  misc_feature 1..20: note = C9Orf72 GTCN PAM targeting sequence
  source 1..20: mol_type = other RNA
tccctgatgttgaagattga

SEQ ID NO: 15255 - RNA, 20 nt, synthetic construct
  misc_feature 1..20: note = C9Orf72 GTCN PAM targeting sequence
  source 1..20: mol_type = other RNA
gagaaacttggaactgtgag

SEQ ID NO: 15256 - RNA, 20 nt, synthetic construct
  misc_feature 1..20: note = C9Orf72 GTCN PAM targeting sequence
  source 1..20: mol_type = other RNA
tcctgggaactatctaatta

SEQ ID NO: 15257 - RNA, 20 nt, synthetic construct
  misc_feature 1..20: note = C9Orf72 GTCN PAM targeting sequence
  source 1..20: mol_type = other RNA
gccctcgggttctattctac

SEQ ID NO: 15258 - RNA, 20 nt, synthetic construct
  misc_feature 1..20: note = C9Orf72 GTCN PAM targeting sequence
  source 1..20: mol_type = other RNA
tccttggtttactttgtttc

SEQ ID NO: 15259 - RNA, 20 nt, synthetic construct
  misc_feature 1..20: note = C9Orf72 GTCN PAM targeting sequence
  source 1..20: mol_type = other RNA
ccacctctgccaaggcctgc

SEQ ID NO: 15260 - RNA, 20 nt, synthetic construct
  misc_feature 1..20: note = C9Orf72 GTCN PAM targeting sequence
  source 1..20: mol_type = other RNA
aatgacaccgtatttcaagt

SEQ ID NO: 15261 - RNA, 20 nt, synthetic construct
  misc_feature 1..20: note = C9Orf72 GTCN PAM targeting sequence
  source 1..20: mol_type = other RNA
tttgacacgggcattgttgt

SEQ ID NO: 15262 - RNA, 20 nt, synthetic construct
  misc_feature 1..20: note = C9Orf72 GTCN PAM targeting sequence
  source 1..20: mol_type = other RNA
gaatacttgaaatacggtgt

SEQ ID NO: 15263 - RNA, 20 nt, synthetic construct
  misc_feature 1..20: note = C9Orf72 GTCN PAM targeting sequence
  source 1..20: mol_type = other RNA
tgtttctgtgatattcacag

SEQ ID NO: 15264 - RNA, 20 nt, synthetic construct
  misc_feature 1..20: note = C9Orf72 GTCN PAM targeting sequence
  source 1..20: mol_type = other RNA
gagaaaaatcatatcttaac

SEQ ID NO: 15265 - RNA, 20 nt, synthetic construct
  misc_feature 1..20: note = C9Orf72 GTCN PAM targeting sequence
  source 1..20: mol_type = other RNA
ggcattacttctacttttgt

SEQ ID NO: 15266 - RNA, 20 nt, synthetic construct
  misc_feature 1..20: note = C9Orf72 GTCN PAM targeting sequence
  source 1..20: mol_type = other RNA
tgcactttcccaggaggggt

SEQ ID NO: 15267 - RNA, 20 nt, synthetic construct
  misc_feature 1..20: note = C9Orf72 GTCN PAM targeting sequence
  source 1..20: mol_type = other RNA
atctggccgcgttgaacacc

SEQ ID NO: 15268 - RNA, 20 nt, synthetic construct
  misc_feature 1..20: note = C9Orf72 GTCN PAM targeting sequence
  source 1..20: mol_type = other RNA
gtgtgctcattgggtctatc

SEQ ID NO: 15269 - RNA, 20 nt, synthetic construct
  misc_feature 1..20: note = C9Orf72 GTCN PAM targeting sequence
  source 1..20: mol_type = other RNA
aaagaagtgcacagattaca

SEQ ID NO: 15270 - RNA, 20 nt, synthetic construct
  misc_feature 1..20: note = C9Orf72 GTCN PAM targeting sequence
  source 1..20: mol_type = other RNA
agtgatgcccaagtcacaat

SEQ ID NO: 15271 - RNA, 20 nt, synthetic construct
  misc_feature 1..20: note = C9Orf72 GTCN PAM targeting sequence
  source 1..20: mol_type = other RNA
caatagtcacttcctttaag

SEQ ID NO: 15272 - RNA, 20 nt, synthetic construct
  misc_feature 1..20: note = C9Orf72 GTCN PAM targeting sequence
  source 1..20: mol_type = other RNA
cttcctttaagcaagtctgt

SEQ ID NO: 15273 - RNA, 20 nt, synthetic construct
  misc_feature 1..20: note = C9Orf72 GTCN PAM targeting sequence
  source 1..20: mol_type = other RNA
gtgtcatctcggagctgtga

SEQ ID NO: 15274 - RNA, 20 nt, synthetic construct
  misc_feature 1..20: note = C9Orf72 GTCN PAM targeting sequence
  source 1..20: mol_type = other RNA
tctcggagctgtgaagcaac

SEQ ID NO: 15275 - RNA, 20 nt, synthetic construct
  misc_feature 1..20: note = C9Orf72 GTCN PAM targeting sequence
  source 1..20: mol_type = other RNA
tgtcccacagaatggggagc

SEQ ID NO: 15276 - RNA, 20 nt, synthetic construct
  misc_feature 1..20: note = C9Orf72 GTCN PAM targeting sequence
  source 1..20: mol_type = other RNA
cacagaatggggagcacacc

SEQ ID NO: 15277 - RNA, 20 nt, synthetic construct
  misc_feature 1..20: note = C9Orf72 GTCN PAM targeting sequence
  source 1..20: mol_type = other RNA
gtgtgctccccattctgtgg

SEQ ID NO: 15278 - RNA, 20 nt, synthetic construct
  misc_feature 1..20: note = C9Orf72 GTCN PAM targeting sequence
  source 1..20: mol_type = other RNA
tcaccactctctagaagctt

SEQ ID NO: 15279 - RNA, 20 nt, synthetic construct
  misc_feature 1..20: note = C9Orf72 GTCN PAM targeting sequence
  source 1..20: mol_type = other RNA
ccacacccccatctcatccc

SEQ ID NO: 15280 - RNA, 20 nt, synthetic construct
  misc_feature 1..20: note = C9Orf72 GTCN PAM targeting sequence
  source 1..20: mol_type = other RNA
ctgccggcgaggagatcatg

SEQ ID NO: 15281 - RNA, 20 nt, synthetic construct
  misc_feature 1..20: note = C9Orf72 GTCN PAM targeting sequence
  source 1..20: mol_type = other RNA
cgggttcctagcgaaccccg

SEQ ID NO: 15282 - RNA, 20 nt, synthetic construct
  misc_feature 1..20: note = C9Orf72 GTCN PAM targeting sequence
  source 1..20: mol_type = other RNA
gggttcgctaggaacccgag

SEQ ID NO: 15283 - RNA, 20 nt, synthetic construct
  misc_feature 1..20: note = C9Orf72 GTCN PAM targeting sequence
  source 1..20: mol_type = other RNA
gcagaagccgcgcgccgccc

SEQ ID NO: 15284 - RNA, 20 nt, synthetic construct
  misc_feature 1..20: note = C9Orf72 GTCN PAM targeting sequence
  source 1..20: mol_type = other RNA
ccgggaaggagacagctcgg

SEQ ID NO: 15285 - RNA, 20 nt, synthetic construct
  misc_feature 1..20: note = C9Orf72 GTCN PAM targeting sequence
  source 1..20: mol_type = other RNA
ccttcccggggacccgctgg

SEQ ID NO: 15286 - RNA, 20 nt, synthetic construct
  misc_feature 1..20: note = C9Orf72 GTCN PAM targeting sequence
  source 1..20: mol_type = other RNA
ctgcgccgccgccgccgccg

SEQ ID NO: 15287 - RNA, 20 nt, synthetic construct
  misc_feature 1..20: note = C9Orf72 GTCN PAM targeting sequence
  source 1..20: mol_type = other RNA
ctagaggcgaaagcccgaca

SEQ ID NO: 15288 - RNA, 20 nt, synthetic construct
  misc_feature 1..20: note = C9Orf72 GTCN PAM targeting sequence
  source 1..20: mol_type = other RNA
ggctttcgcctctagcgact

SEQ ID NO: 15289 - RNA, 20 nt, synthetic construct
  misc_feature 1..20: note = C9Orf72 GTCN PAM targeting sequence
  source 1..20: mol_type = other RNA
gagaaatgagagggaaagta

SEQ ID NO: 15290 - RNA, 20 nt, synthetic construct
  misc_feature 1..20: note = C9Orf72 GTCN PAM targeting sequence
  source 1..20: mol_type = other RNA
agctctgaggagagcccccg

SEQ ID NO: 15291 - RNA, 20 nt, synthetic construct
  misc_feature 1..20: note = C9Orf72 GTCN PAM targeting sequence
  source 1..20: mol_type = other RNA
gggcgggcccgggggcgggc

SEQ ID NO: 15292 - RNA, 20 nt, synthetic construct
  misc_feature 1..20: note = C9Orf72 GTCN PAM targeting sequence
  source 1..20: mol_type = other RNA
cgcgctaggggccggggccg

SEQ ID NO: 15293 - RNA, 20 nt, synthetic construct
  misc_feature 1..20: note = C9Orf72 GTCN PAM targeting sequence
  source 1..20: mol_type = other RNA
tttcttgttcaccctcagcg

SEQ ID NO: 15294 - RNA, 20 nt, synthetic construct
  misc_feature 1..20: note = C9Orf72 GTCN PAM targeting sequence
  source 1..20: mol_type = other RNA
agcaagagcaggtgtgggtt

SEQ ID NO: 15295 - RNA, 20 nt, synthetic construct
  misc_feature 1..20: note = C9Orf72 GTCN PAM targeting sequence
  source 1..20: mol_type = other RNA
ctgctgcccggttgcttctc

SEQ ID NO: 15296 - RNA, 20 nt, synthetic construct
  misc_feature 1..20: note = C9Orf72 GTCN PAM targeting sequence
  source 1..20: mol_type = other RNA
gccgtccctgctgcccggtt

SEQ ID NO: 15297 - RNA, 20 nt, synthetic construct
  misc_feature 1..20: note = C9Orf72 GTCN PAM targeting sequence
  source 1..20: mol_type = other RNA
tcttttacgtgggcggaact

SEQ ID NO: 15298 - RNA, 20 nt, synthetic construct
  misc_feature 1..20: note = C9Orf72 GTCN PAM targeting sequence
  source 1..20: mol_type = other RNA
ctgtttgacgcacctctctt

SEQ ID NO: 15299 - RNA, 20 nt, synthetic construct
  misc_feature 1..20: note = C9Orf72 GTCN PAM targeting sequence
  source 1..20: mol_type = other RNA
aacagcgacaagttccgccc

SEQ ID NO: 15300 - RNA, 20 nt, synthetic construct
  misc_feature 1..20: note = C9Orf72 GTCN PAM targeting sequence
  source 1..20: mol_type = other RNA
cgctaggaaagagaggtgcg

SEQ ID NO: 15301 - RNA, 20 nt, synthetic construct
  misc_feature 1..20: note = C9Orf72 GTCN PAM targeting sequence
  source 1..20: mol_type = other RNA
gtctgttttctatgtgcgat

SEQ ID NO: 15302 - RNA, 20 nt, synthetic construct
  misc_feature 1..20: note = C9Orf72 GTCN PAM targeting sequence
  source 1..20: mol_type = other RNA
gttttctatgtgcgatgacg

SEQ ID NO: 15303 - RNA, 20 nt, synthetic construct
  misc_feature 1..20: note = C9Orf72 GTCN PAM targeting sequence
  source 1..20: mol_type = other RNA
tcgcacatagaaaacagaca

SEQ ID NO: 15304 - RNA, 20 nt, synthetic construct
  misc_feature 1..20: note = C9Orf72 GTCN PAM targeting sequence
  source 1..20: mol_type = other RNA
tgttcttttatcttaagacc

SEQ ID NO: 15305 - RNA, 20 nt, synthetic construct
  misc_feature 1..20: note = C9Orf72 GTCN PAM targeting sequence
  source 1..20: mol_type = other RNA
taagataaaagaacaggaca

SEQ ID NO: 15306 - RNA, 20 nt, synthetic construct
  misc_feature 1..20: note = C9Orf72 GTCN PAM targeting sequence
  source 1..20: mol_type = other RNA
tcactttctccagatccagc

SEQ ID NO: 15307 - RNA, 20 nt, synthetic construct
  misc_feature 1..20: note = C9Orf72 GTCN PAM targeting sequence
  source 1..20: mol_type = other RNA
tacggtaaaaacaaaatttc

SEQ ID NO: 15308 - RNA, 20 nt, synthetic construct
  misc_feature 1..20: note = C9Orf72 GTCN PAM targeting sequence
  source 1..20: mol_type = other RNA
cctaccagggtttgcagtgg

SEQ ID NO: 15309 - RNA, 20 nt, synthetic construct
  misc_feature 1..20: note = C9Orf72 GTCN PAM targeting sequence
  source 1..20: mol_type = other RNA
cctgcaaagtcatcgcaatt

SEQ ID NO: 15310 - RNA, 20 nt, synthetic construct
  misc_feature 1..20: note = C9Orf72 GTCN PAM targeting sequence
  source 1..20: mol_type = other RNA
tcgcaattttgcctttacat

SEQ ID NO: 15311 - RNA, 20 nt, synthetic construct
  misc_feature 1..20: note = C9Orf72 GTCN PAM targeting sequence
  source 1..20: mol_type = other RNA
tttttgctagttgcaatatg

SEQ ID NO: 15312 - RNA, 20 nt, synthetic construct
  misc_feature 1..20: note = C9Orf72 GTCN PAM targeting sequence
  source 1..20: mol_type = other RNA
tttggtctgcaggtgtatag

SEQ ID NO: 15313 - RNA, 20 nt, synthetic construct
  misc_feature 1..20: note = C9Orf72 GTCN PAM targeting sequence
  source 1..20: mol_type = other RNA
gcaggtgtatagattccact

SEQ ID NO: 15314 - RNA, 20 nt, synthetic construct
  misc_feature 1..20: note = C9Orf72 GTCN PAM targeting sequence
  source 1..20: mol_type = other RNA
acaccttctgcagaaacaga

SEQ ID NO: 15315 - RNA, 20 nt, synthetic construct
  misc_feature 1..20: note = C9Orf72 GTCN PAM targeting sequence
  source 1..20: mol_type = other RNA
gtttctgcagaaggtgtaga

SEQ ID NO: 15316 - RNA, 20 nt, synthetic construct
  misc_feature 1..20: note = C9Orf72 GTCN PAM targeting sequence
  source 1..20: mol_type = other RNA
ttctttttatacccaactaa

SEQ ID NO: 15317 - RNA, 20 nt, synthetic construct
  misc_feature 1..20: note = C9Orf72 GTCN PAM targeting sequence
  source 1..20: mol_type = other RNA
taagtgcttttctaccccct

SEQ ID NO: 15318 - RNA, 20 nt, synthetic construct
  misc_feature 1..20: note = C9Orf72 GTCN PAM targeting sequence
  source 1..20: mol_type = other RNA
tttgtcctaagtgcttttct

SEQ ID NO: 15319 - RNA, 20 nt, synthetic construct
  misc_feature 1..20: note = C9Orf72 GTCN PAM targeting sequence
  source 1..20: mol_type = other RNA
agctgctgcaactgcccgtt

SEQ ID NO: 15320 - RNA, 20 nt, synthetic construct
  misc_feature 1..20: note = C9Orf72 GTCN PAM targeting sequence
  source 1..20: mol_type = other RNA
caacgggcagttgcagcagc

SEQ ID NO: 15321 - RNA, 20 nt, synthetic construct
  misc_feature 1..20: note = C9Orf72 GTCN PAM targeting sequence
  source 1..20: mol_type = other RNA
caggtcacaacgggcagttg

SEQ ID NO: 15322 - RNA, 20 nt, synthetic construct
  misc_feature 1..20: note = C9Orf72 GTCN PAM targeting sequence
  source 1..20: mol_type = other RNA
ttttagcaactattagataa

SEQ ID NO: 15323 - RNA, 20 nt, synthetic construct
  misc_feature 1..20: note = C9Orf72 GTCN PAM targeting sequence
  source 1..20: mol_type = other RNA
tcggtatatccacacaacaa

SEQ ID NO: 15324 - RNA, 20 nt, synthetic construct
  misc_feature 1..20: note = C9Orf72 GTCN PAM targeting sequence
  source 1..20: mol_type = other RNA
aaataaaaatacagagatga

SEQ ID NO: 15325 - RNA, 20 nt, synthetic construct
  misc_feature 1..20: note = C9Orf72 GTCN PAM targeting sequence
  source 1..20: mol_type = other RNA
gtcaaaataaaaatacagag

SEQ ID NO: 15326 - RNA, 20 nt, synthetic construct
  misc_feature 1..20: note = C9Orf72 GTCN PAM targeting sequence
  source 1..20: mol_type = other RNA
actctgtttctataaattca

SEQ ID NO: 15327 - RNA, 20 nt, synthetic construct
  misc_feature 1..20: note = C9Orf72 GTCN PAM targeting sequence
  source 1..20: mol_type = other RNA
aatacatctagagatttaat

SEQ ID NO: 15328 - RNA, 20 nt, synthetic construct
  misc_feature 1..20: note = C9Orf72 GTCN PAM targeting sequence
  source 1..20: mol_type = other RNA
tcatgttgtacattaaatct

SEQ ID NO: 15329 - RNA, 20 nt, synthetic construct
  misc_feature 1..20: note = C9Orf72 GTCN PAM targeting sequence
  source 1..20: mol_type = other RNA
attcttacactgctataaag

SEQ ID NO: 15330 - RNA, 20 nt, synthetic construct
  misc_feature 1..20: note = C9Orf72 GTCN PAM targeting sequence
  source 1..20: mol_type = other RNA
ccctatgccttccatcatga

SEQ ID NO: 15331 - RNA, 20 nt, synthetic construct
  misc_feature 1..20: note = C9Orf72 GTCN PAM targeting sequence
  source 1..20: mol_type = other RNA
ggggtctccctatgccttcc

SEQ ID NO: 15332 - RNA, 20 nt, synthetic construct
  misc_feature 1..20: note = C9Orf72 GTCN PAM targeting sequence
  source 1..20: mol_type = other RNA
gaactcactatatagtacca

SEQ ID NO: 15333 - RNA, 20 nt, synthetic construct
  misc_feature 1..20: note = C9Orf72 GTCN PAM targeting sequence
  source 1..20: mol_type = other RNA
cctcttggtactatatagtg

SEQ ID NO: 15334 - RNA, 20 nt, synthetic construct
  misc_feature 1..20: note = C9Orf72 GTCN PAM targeting sequence
  source 1..20: mol_type = other RNA
ccacccaaatctcatgttca

SEQ ID NO: 15335 - RNA, 20 nt, synthetic construct
  misc_feature 1..20: note = C9Orf72 GTCN PAM targeting sequence
  source 1..20: mol_type = other RNA
ttctcatattgcaaaatact

SEQ ID NO: 15336 - RNA, 20 nt, synthetic construct
  misc_feature 1..20: note = C9Orf72 GTCN PAM targeting sequence
  source 1..20: mol_type = other RNA
tgccttaccaacagttcccc

SEQ ID NO: 15337 - RNA, 20 nt, synthetic construct
  misc_feature 1..20: note = C9Orf72 GTCN PAM targeting sequence
  source 1..20: mol_type = other RNA
taactcgatccagcattcat

SEQ ID NO: 15338 - RNA, 20 nt, synthetic construct
  misc_feature 1..20: note = C9Orf72 GTCN PAM targeting sequence
  source 1..20: mol_type = other RNA
aaagtcccaagtctcacctg

SEQ ID NO: 15339 - RNA, 20 nt, synthetic construct
  misc_feature 1..20: note = C9Orf72 GTCN PAM targeting sequence
  source 1..20: mol_type = other RNA
caagtctcacctgagacgaa

SEQ ID NO: 15340 - RNA, 20 nt, synthetic construct
  misc_feature 1..20: note = C9Orf72 GTCN PAM targeting sequence
  source 1..20: mol_type = other RNA
cacctgagacgaagctagtc

SEQ ID NO: 15341 - RNA, 20 nt, synthetic construct
  misc_feature 1..20: note = C9Orf72 GTCN PAM targeting sequence
  source 1..20: mol_type = other RNA
caggtgagacttgggacttt

SEQ ID NO: 15342 - RNA, 20 nt, synthetic construct
  misc_feature 1..20: note = C9Orf72 GTCN PAM targeting sequence
  source 1..20: mol_type = other RNA
cttctacctatgaacctgta

SEQ ID NO: 15343 - RNA, 20 nt, synthetic construct
  misc_feature 1..20: note = C9Orf72 GTCN PAM targeting sequence
  source 1..20: mol_type = other RNA
gaaagccagccgggcagtca

SEQ ID NO: 15344 - RNA, 20 nt, synthetic construct
  misc_feature 1..20: note = C9Orf72 GTCN PAM targeting sequence
  source 1..20: mol_type = other RNA
ttaaatgttaaagctctgaa

SEQ ID NO: 15345 - RNA, 20 nt, synthetic construct
  misc_feature 1..20: note = C9Orf72 GTCN PAM targeting sequence
  source 1..20: mol_type = other RNA
aaggagattatttcagagct

SEQ ID NO: 15346 - RNA, 20 nt, synthetic construct
  misc_feature 1..20: note = C9Orf72 GTCN PAM targeting sequence
  source 1..20: mol_type = other RNA
ggaggacggtggctgtcttg

SEQ ID NO: 15347 - RNA, 20 nt, synthetic construct
  misc_feature 1..20: note = C9Orf72 GTCN PAM targeting sequence
  source 1..20: mol_type = other RNA
tccagaccccagaatggtag

SEQ ID NO: 15348 - RNA, 20 nt, synthetic construct
  misc_feature 1..20: note = C9Orf72 GTCN PAM targeting sequence
  source 1..20: mol_type = other RNA
tgtcatagctctgctaggca

SEQ ID NO: 15349 - RNA, 20 nt, synthetic construct
  misc_feature 1..20: note = C9Orf72 GTCN PAM targeting sequence
  source 1..20: mol_type = other RNA
tagctctgctaggcagtgcc

SEQ ID NO: 15350 - RNA, 20 nt, synthetic construct
  misc_feature 1..20: note = C9Orf72 GTCN PAM targeting sequence
  source 1..20: mol_type = other RNA
cctggggcactgcctagcag

SEQ ID NO: 15351 - RNA, 20 nt, synthetic construct
  misc_feature 1..20: note = C9Orf72 GTCN PAM targeting sequence
  source 1..20: mol_type = other RNA
ggacatccaggctttttcat

SEQ ID NO: 15352 - RNA, 20 nt, synthetic construct
  misc_feature 1..20: note = C9Orf72 GTCN PAM targeting sequence
  source 1..20: mol_type = other RNA
agacagaagcctgttactgg

SEQ ID NO: 15353 - RNA, 20 nt, synthetic construct
  misc_feature 1..20: note = C9Orf72 GTCN PAM targeting sequence
  source 1..20: mol_type = other RNA
gcagcaacctcaattcttgc

SEQ ID NO: 15354 - RNA, 20 nt, synthetic construct
  misc_feature 1..20: note = C9Orf72 GTCN PAM targeting sequence
  source 1..20: mol_type = other RNA
aattctttcttctgaggagg

SEQ ID NO: 15355 - RNA, 20 nt, synthetic construct
  misc_feature 1..20: note = C9Orf72 GTCN PAM targeting sequence
  source 1..20: mol_type = other RNA
ctttttctgccttatgcctc

SEQ ID NO: 15356 - RNA, 20 nt, synthetic construct
  misc_feature 1..20: note = C9Orf72 GTCN PAM targeting sequence
  source 1..20: mol_type = other RNA
cagtctctttttctgcctta

SEQ ID NO: 15357 - RNA, 20 nt, synthetic construct
  misc_feature 1..20: note = C9Orf72 GTCN PAM targeting sequence
  source 1..20: mol_type = other RNA
agtgccctgtttgaccttga

SEQ ID NO: 15358 - RNA, 20 nt, synthetic construct
  misc_feature 1..20: note = C9Orf72 GTCN PAM targeting sequence
  source 1..20: mol_type = other RNA
aacagggcacttgacctcca

SEQ ID NO: 15359 - RNA, 20 nt, synthetic construct
  misc_feature 1..20: note = C9Orf72 GTCN PAM targeting sequence
  source 1..20: mol_type = other RNA
gaagtaggccagtgtataag

SEQ ID NO: 15360 - RNA, 20 nt, synthetic construct
  misc_feature 1..20: note = C9Orf72 GTCN PAM targeting sequence
  source 1..20: mol_type = other RNA
ttccctaagggtgagcttgc

SEQ ID NO: 15361 - RNA, 20 nt, synthetic construct
  misc_feature 1..20: note = C9Orf72 GTCN PAM targeting sequence
  source 1..20: mol_type = other RNA
tacttcaccattttgcctct

SEQ ID NO: 15362 - RNA, 20 nt, synthetic construct
  misc_feature 1..20: note = C9Orf72 GTCN PAM targeting sequence
  source 1..20: mol_type = other RNA
tactgcctctctaaaatagt

SEQ ID NO: 15363 - RNA, 20 nt, synthetic construct
  misc_feature 1..20: note = C9Orf72 GTCN PAM targeting sequence
  source 1..20: mol_type = other RNA
ggcagttgtcatactgcctc

SEQ ID NO: 15364 - RNA, 20 nt, synthetic construct
  misc_feature 1..20: note = C9Orf72 GTCN PAM targeting sequence
  source 1..20: mol_type = other RNA
ggcaaccatcagatgatggt

SEQ ID NO: 15365 - RNA, 20 nt, synthetic construct
  misc_feature 1..20: note = C9Orf72 GTCN PAM targeting sequence
  source 1..20: mol_type = other RNA
ccaccacccaccaggaatgt

SEQ ID NO: 15366 - RNA, 20 nt, synthetic construct
  misc_feature 1..20: note = C9Orf72 GTCN PAM targeting sequence
  source 1..20: mol_type = other RNA
caaggctgtaagagggagca

SEQ ID NO: 15367 - RNA, 20 nt, synthetic construct
  misc_feature 1..20: note = C9Orf72 GTCN PAM targeting sequence
  source 1..20: mol_type = other RNA
tcctaggcctcggggcctgt

SEQ ID NO: 15368 - RNA, 20 nt, synthetic construct
  misc_feature 1..20: note = C9Orf72 GTCN PAM targeting sequence
  source 1..20: mol_type = other RNA
ctctcatcacaggccccgag

SEQ ID NO: 15369 - RNA, 20 nt, synthetic construct
  misc_feature 1..20: note = C9Orf72 GTCN PAM targeting sequence
  source 1..20: mol_type = other RNA
caccaacagtgtaaaagtgt

SEQ ID NO: 15370 - RNA, 20 nt, synthetic construct
  misc_feature 1..20: note = C9Orf72 GTCN PAM targeting sequence
  source 1..20: mol_type = other RNA
gtgtggcgattcctcaggga

SEQ ID NO: 15371 - RNA, 20 nt, synthetic construct
  misc_feature 1..20: note = C9Orf72 GTCN PAM targeting sequence
  source 1..20: mol_type = other RNA
aatggtatttctagttctag

SEQ ID NO: 15372 - RNA, 20 nt, synthetic construct
  misc_feature 1..20: note = C9Orf72 GTCN PAM targeting sequence
  source 1..20: mol_type = other RNA
tttgggtatatacccagtga

SEQ ID NO: 15373 - RNA, 20 nt, synthetic construct
  misc_feature 1..20: note = C9Orf72 GTCN PAM targeting sequence
  source 1..20: mol_type = other RNA
ttatagcagcaggatttata

SEQ ID NO: 15374 - RNA, 20 nt, synthetic construct
  misc_feature 1..20: note = C9Orf72 GTCN PAM targeting sequence
  source 1..20: mol_type = other RNA
ttgctattgtgaatagtgcc

SEQ ID NO: 15375 - RNA, 20 nt, synthetic construct
  misc_feature 1..20: note = C9Orf72 GTCN PAM targeting sequence
  source 1..20: mol_type = other RNA
aacagtgatagactggatta

SEQ ID NO: 15376 - RNA, 20 nt, synthetic construct
  misc_feature 1..20: note = C9Orf72 GTCN PAM targeting sequence
  source 1..20: mol_type = other RNA
atcactgttggacatttggg

SEQ ID NO: 15377 - RNA, 20 nt, synthetic construct
  misc_feature 1..20: note = C9Orf72 GTCN PAM targeting sequence
  source 1..20: mol_type = other RNA
tttgtagggacatggatgaa

SEQ ID NO: 15378 - RNA, 20 nt, synthetic construct
  misc_feature 1..20: note = C9Orf72 GTCN PAM targeting sequence
  source 1..20: mol_type = other RNA
ctacaaaggacatgaactca

SEQ ID NO: 15379 - RNA, 20 nt, synthetic construct
  misc_feature 1..20: note = C9Orf72 GTCN PAM targeting sequence
  source 1..20: mol_type = other RNA
ttctcagtaaactattgcaa

SEQ ID NO: 15380 - RNA, 20 nt, synthetic construct
  misc_feature 1..20: note = C9Orf72 GTCN PAM targeting sequence
  source 1..20: mol_type = other RNA
aaaaaccaaacaccacatgt

SEQ ID NO: 15381 - RNA, 20 nt, synthetic construct
  misc_feature 1..20: note = C9Orf72 GTCN PAM targeting sequence
  source 1..20: mol_type = other RNA
atgtgttctcattgttcaat

SEQ ID NO: 15382 - RNA, 20 nt, synthetic construct
  misc_feature 1..20: note = C9Orf72 GTCN PAM targeting sequence
  source 1..20: mol_type = other RNA
ccagagtgtgatgttcccct

SEQ ID NO: 15383 - RNA, 20 nt, synthetic construct
  misc_feature 1..20: note = C9Orf72 GTCN PAM targeting sequence
  source 1..20: mol_type = other RNA
tttagcattaggtatatctc

SEQ ID NO: 15384 - RNA, 20 nt, synthetic construct
  misc_feature 1..20: note = C9Orf72 GTCN PAM targeting sequence
  source 1..20: mol_type = other RNA
tatgagtctttctccccatt

SEQ ID NO: 15385 - RNA, 20 nt, synthetic construct
  misc_feature 1..20: note = C9Orf72 GTCN PAM targeting sequence
  source 1..20: mol_type = other RNA
ttctccccattgttttggtt

SEQ ID NO: 15386 - RNA, 20 nt, synthetic construct
  misc_feature 1..20: note = C9Orf72 GTCN PAM targeting sequence
  source 1..20: mol_type = other RNA
agcaggctgcataaatttgc

SEQ ID NO: 15387 - RNA, 20 nt, synthetic construct
  misc_feature 1..20: note = C9Orf72 GTCN PAM targeting sequence
  source 1..20: mol_type = other RNA
tttctgtgctcatgcctatg

SEQ ID NO: 15388 - RNA, 20 nt, synthetic construct
  misc_feature 1..20: note = C9Orf72 GTCN PAM targeting sequence
  source 1..20: mol_type = other RNA
aagatttcacagatccctag

SEQ ID NO: 15389 - RNA, 20 nt, synthetic construct
  misc_feature 1..20: note = C9Orf72 GTCN PAM targeting sequence
  source 1..20: mol_type = other RNA
ggtttgctatgctttagcaa

SEQ ID NO: 15390 - RNA, 20 nt, synthetic construct
  misc_feature 1..20: note = C9Orf72 GTCN PAM targeting sequence
  source 1..20: mol_type = other RNA
cagatggaaatgagaaattt

SEQ ID NO: 15391 - RNA, 20 nt, synthetic construct
  misc_feature 1..20: note = C9Orf72 GTCN PAM targeting sequence
  source 1..20: mol_type = other RNA
aggctgaggaggtctcagat

SEQ ID NO: 15392 - RNA, 20 nt, synthetic construct
  misc_feature 1..20: note = C9Orf72 GTCN PAM targeting sequence
  source 1..20: mol_type = other RNA
atatcactatcagtattttg

SEQ ID NO: 15393 - RNA, 20 nt, synthetic construct
  misc_feature 1..20: note = C9Orf72 GTCN PAM targeting sequence
  source 1..20: mol_type = other RNA
tcttctgagccctctaaaat

SEQ ID NO: 15394 - RNA, 20 nt, synthetic construct
  misc_feature 1..20: note = C9Orf72 GTCN PAM targeting sequence
  source 1..20: mol_type = other RNA
cttctacattttcaggtatc

SEQ ID NO: 15395 - RNA, 20 nt, synthetic construct
  misc_feature 1..20: note = C9Orf72 GTCN PAM targeting sequence
  source 1..20: mol_type = other RNA
attcttgcattgctataaag

SEQ ID NO: 15396 - RNA, 20 nt, synthetic construct
  misc_feature 1..20: note = C9Orf72 GTCN PAM targeting sequence
  source 1..20: mol_type = other RNA
caagtatttctttatagcaa

SEQ ID NO: 15397 - RNA, 20 nt, synthetic construct
  misc_feature 1..20: note = C9Orf72 GTCN PAM targeting sequence
  source 1..20: mol_type = other RNA
attaaacctcttttctttgt

SEQ ID NO: 15398 - RNA, 20 nt, synthetic construct
  misc_feature 1..20: note = C9Orf72 GTCN PAM targeting sequence
  source 1..20: mol_type = other RNA
agcaaattaacatatccatc

SEQ ID NO: 15399 - RNA, 20 nt, synthetic construct
  misc_feature 1..20: note = C9Orf72 GTCN PAM targeting sequence
  source 1..20: mol_type = other RNA
ggaggattaagtgtaatttt

SEQ ID NO: 15400 - RNA, 20 nt, synthetic construct
  misc_feature 1..20: note = C9Orf72 GTCN PAM targeting sequence
  source 1..20: mol_type = other RNA
tccctaggatgtagatatgt

SEQ ID NO: 15401 - RNA, 20 nt, synthetic construct
  misc_feature 1..20: note = C9Orf72 GTCN PAM targeting sequence
  source 1..20: mol_type = other RNA
agttatctcctctgtaaaac

SEQ ID NO: 15402 - RNA, 20 nt, synthetic construct
  misc_feature 1..20: note = C9Orf72 GTCN PAM targeting sequence
  source 1..20: mol_type = other RNA
agaggacaacaacctggtac

SEQ ID NO: 15403 - RNA, 20 nt, synthetic construct
  misc_feature 1..20: note = C9Orf72 GTCN PAM targeting sequence
  source 1..20: mol_type = other RNA
tctggactcagtgagctcta

SEQ ID NO: 15404 - RNA, 20 nt, synthetic construct
  misc_feature 1..20: note = C9Orf72 GTCN PAM targeting sequence
  source 1..20: mol_type = other RNA
tattctaaactggggatgct

SEQ ID NO: 15405 - RNA, 20 nt, synthetic construct
  misc_feature 1..20: note = C9Orf72 GTCN PAM targeting sequence
  source 1..20: mol_type = other RNA
gtaggccaaattttgaagta

SEQ ID NO: 15406 - RNA, 20 nt, synthetic construct
  misc_feature 1..20: note = C9Orf72 GTCN PAM targeting sequence
  source 1..20: mol_type = other RNA
ctggctagaaagcatcatgc

SEQ ID NO: 15407 - RNA, 20 nt, synthetic construct
  misc_feature 1..20: note = C9Orf72 GTCN PAM targeting sequence
  source 1..20: mol_type = other RNA
ttgtgtagcagtatagtagc

SEQ ID NO: 15408 - RNA, 20 nt, synthetic construct
  misc_feature 1..20: note = C9Orf72 GTCN PAM targeting sequence
  source 1..20: mol_type = other RNA
ttcattagattggagcaaaa

SEQ ID NO: 15409 - RNA, 20 nt, synthetic construct
  misc_feature 1..20: note = C9Orf72 GTCN PAM targeting sequence
  source 1..20: mol_type = other RNA
aaaatactttattgcctgaa

SEQ ID NO: 15410 - RNA, 20 nt, synthetic construct
  misc_feature 1..20: note = C9Orf72 GTCN PAM targeting sequence
  source 1..20: mol_type = other RNA
tcctcttttaccctttcagg

SEQ ID NO: 15411 - RNA, 20 nt, synthetic construct
  misc_feature 1..20: note = C9Orf72 GTCN PAM targeting sequence
  source 1..20: mol_type = other RNA
tctgggaaccaaagagaaaa

SEQ ID NO: 15412 - RNA, 20 nt, synthetic construct
  misc_feature 1..20: note = C9Orf72 GTCN PAM targeting sequence
  source 1..20: mol_type = other RNA
tcaagtgagaagcctagtcc

SEQ ID NO: 15413 - RNA, 20 nt, synthetic construct
  misc_feature 1..20: note = C9Orf72 GTCN PAM targeting sequence
  source 1..20: mol_type = other RNA
tccattttcaaccagaatga

SEQ ID NO: 15414 - RNA, 20 nt, synthetic construct
  misc_feature 1..20: note = C9Orf72 GTCN PAM targeting sequence
  source 1..20: mol_type = other RNA
ttctggttgaaaatggagga

SEQ ID NO: 15415 - RNA, 20 nt, synthetic construct
  misc_feature 1..20: note = C9Orf72 GTCN PAM targeting sequence
  source 1..20: mol_type = other RNA
tttaagggtgtcattctggt

SEQ ID NO: 15416 - RNA, 20 nt, synthetic construct
  misc_feature 1..20: note = C9Orf72 GTCN PAM targeting sequence
  source 1..20: mol_type = other RNA
tacaaaaagactctacaact

SEQ ID NO: 15417 - RNA, 20 nt, synthetic construct
  misc_feature 1..20: note = C9Orf72 GTCN PAM targeting sequence
  source 1..20: mol_type = other RNA
ttttgtatgactgcattaat

SEQ ID NO: 15418 - RNA, 20 nt, synthetic construct
  misc_feature 1..20: note = C9Orf72 GTCN PAM targeting sequence
  source 1..20: mol_type = other RNA
ttgcctttgattagttatga

SEQ ID NO: 15419 - RNA, 20 nt, synthetic construct
  misc_feature 1..20: note = C9Orf72 GTCN PAM targeting sequence
  source 1..20: mol_type = other RNA
taactaatcaaaggcaaaga

SEQ ID NO: 15420 - RNA, 20 nt, synthetic construct
  misc_feature 1..20: note = C9Orf72 GTCN PAM targeting sequence
  source 1..20: mol_type = other RNA
tgtgtgatcaagcaagctaa

SEQ ID NO: 15421 - RNA, 20 nt, synthetic construct
  misc_feature 1..20: note = C9Orf72 GTCN PAM targeting sequence
  source 1..20: mol_type = other RNA
tttgttattgcttttattat

SEQ ID NO: 15422 - RNA, 20 nt, synthetic construct
  misc_feature 1..20: note = C9Orf72 GTCN PAM targeting sequence
  source 1..20: mol_type = other RNA
aaaatgccagttgttgtcag

SEQ ID NO: 15423 - RNA, 20 nt, synthetic construct
  misc_feature 1..20: note = C9Orf72 GTCN PAM targeting sequence
  source 1..20: mol_type = other RNA
ggaaggcattcttgctatta

SEQ ID NO: 15424 - RNA, 20 nt, synthetic construct
  misc_feature 1..20: note = C9Orf72 GTCN PAM targeting sequence
  source 1..20: mol_type = other RNA
cagttaaatctaatttgctg

SEQ ID NO: 15425 - RNA, 20 nt, synthetic construct
  misc_feature 1..20: note = C9Orf72 GTCN PAM targeting sequence
  source 1..20: mol_type = other RNA
tacataagatctttcacatg

SEQ ID NO: 15426 - RNA, 20 nt, synthetic construct
  misc_feature 1..20: note = C9Orf72 GTCN PAM targeting sequence
  source 1..20: mol_type = other RNA
caaaaaagaaaaaaagaaaa

SEQ ID NO: 15427 - RNA, 20 nt, synthetic construct
  misc_feature 1..20: note = C9Orf72 GTCN PAM targeting sequence
  source 1..20: mol_type = other RNA
aggctggagtgcaatggcac

SEQ ID NO: 15428 - RNA, 20 nt, synthetic construct
  misc_feature 1..20: note = C9Orf72 GTCN PAM targeting sequence
  source 1..20: mol_type = other RNA
caaactcccaacctcaggtg

SEQ ID NO: 15429 - RNA, 20 nt, synthetic construct
  misc_feature 1..20: note = C9Orf72 GTCN PAM targeting sequence
  source 1..20: mol_type = other RNA
aggcacggtggctcacacct

SEQ ID NO: 15430 - RNA, 20 nt, synthetic construct
  misc_feature 1..20: note = C9Orf72 GTCN PAM targeting sequence
  source 1..20: mol_type = other RNA
gtaatgattaaggcaaccac

SEQ ID NO: 15431 - RNA, 20 nt, synthetic construct
  misc_feature 1..20: note = C9Orf72 GTCN PAM targeting sequence
  source 1..20: mol_type = other RNA
atcatcagaactgtagagtg

SEQ ID NO: 15432 - RNA, 20 nt, synthetic construct
  misc_feature 1..20: note = C9Orf72 GTCN PAM targeting sequence
  source 1..20: mol_type = other RNA
ggagttcaacaccagcctga

SEQ ID NO: 15433 - RNA, 20 nt, synthetic construct
  misc_feature 1..20: note = C9Orf72 GTCN PAM targeting sequence
  source 1..20: mol_type = other RNA
ggctggtgttgaactcctga

SEQ ID NO: 15434 - RNA, 20 nt, synthetic construct
  misc_feature 1..20: note = C9Orf72 GTCN PAM targeting sequence
  source 1..20: mol_type = other RNA
cttgaacccgggaggtggag

SEQ ID NO: 15435 - RNA, 20 nt, synthetic construct
  misc_feature 1..20: note = C9Orf72 GTCN PAM targeting sequence
  source 1..20: mol_type = other RNA
caggaaaaaccaaaaggaaa

SEQ ID NO: 15436 - RNA, 20 nt, synthetic construct
  misc_feature 1..20: note = C9Orf72 GTCN PAM targeting sequence
  source 1..20: mol_type = other RNA
aagatgtgattctcttgttg

SEQ ID NO: 15437 - RNA, 20 nt, synthetic construct
  misc_feature 1..20: note = C9Orf72 GTCN PAM targeting sequence
  source 1..20: mol_type = other RNA
ggtcaaagatgtgattctct

SEQ ID NO: 15438 - RNA, 20 nt, synthetic construct
  misc_feature 1..20: note = C9Orf72 GTCN PAM targeting sequence
  source 1..20: mol_type = other RNA
tctctaaaatttaagaagat

SEQ ID NO: 15439 - RNA, 20 nt, synthetic construct
  misc_feature 1..20: note = C9Orf72 GTCN PAM targeting sequence
  source 1..20: mol_type = other RNA
taatttgatggaatttagat

SEQ ID NO: 15440 - RNA, 20 nt, synthetic construct
  misc_feature 1..20: note = C9Orf72 GTCN PAM targeting sequence
  source 1..20: mol_type = other RNA
gtaacaaaaccatcattgtg

SEQ ID NO: 15441 - RNA, 20 nt, synthetic construct
  misc_feature 1..20: note = C9Orf72 GTCN PAM targeting sequence
  source 1..20: mol_type = other RNA
cccactactcaggcatatgg

SEQ ID NO: 15442 - RNA, 20 nt, synthetic construct
  misc_feature 1..20: note = C9Orf72 GTCN PAM targeting sequence
  source 1..20: mol_type = other RNA
agaaggggagccattgctgt

SEQ ID NO: 15443 - RNA, 20 nt, synthetic construct
  misc_feature 1..20: note = C9Orf72 GTCN PAM targeting sequence
  source 1..20: mol_type = other RNA
catgctatttgagaccctgg

SEQ ID NO: 15444 - RNA, 20 nt, synthetic construct
  misc_feature 1..20: note = C9Orf72 GTCN PAM targeting sequence
  source 1..20: mol_type = other RNA
caaatagcatgtgacatagt

SEQ ID NO: 15445 - RNA, 20 nt, synthetic construct
  misc_feature 1..20: note = C9Orf72 GTCN PAM targeting sequence
  source 1..20: mol_type = other RNA
agggtctcaaatagcatgtg

SEQ ID NO: 15446 - RNA, 20 nt, synthetic construct
  misc_feature 1..20: note = C9Orf72 GTCN PAM targeting sequence
  source 1..20: mol_type = other RNA
gcctacagtccagggtctca

SEQ ID NO: 15447 - RNA, 20 nt, synthetic construct
  misc_feature 1..20: note = C9Orf72 GTCN PAM targeting sequence
  source 1..20: mol_type = other RNA
ggctagttttatatattcat

SEQ ID NO: 15448 - RNA, 20 nt, synthetic construct
  misc_feature 1..20: note = C9Orf72 GTCN PAM targeting sequence
  source 1..20: mol_type = other RNA
taaaccaaaaagttactaat

SEQ ID NO: 15449 - RNA, 20 nt, synthetic construct
  misc_feature 1..20: note = C9Orf72 GTCN PAM targeting sequence
  source 1..20: mol_type = other RNA
aggtccttggcatgactctc

SEQ ID NO: 15450 - RNA, 20 nt, synthetic construct
  misc_feature 1..20: note = C9Orf72 GTCN PAM targeting sequence
  source 1..20: mol_type = other RNA
ttggcatgactctctagttt

SEQ ID NO: 15451 - RNA, 20 nt, synthetic construct
  misc_feature 1..20: note = C9Orf72 GTCN PAM targeting sequence
  source 1..20: mol_type = other RNA
tgccaaggaccttgacatat

SEQ ID NO: 15452 - RNA, 20 nt, synthetic construct
  misc_feature 1..20: note = C9Orf72 GTCN PAM targeting sequence
  source 1..20: mol_type = other RNA
agtggagccagattgtggaa

SEQ ID NO: 15453 - RNA, 20 nt, synthetic construct
  misc_feature 1..20: note = C9Orf72 GTCN PAM targeting sequence
  source 1..20: mol_type = other RNA
gcaagatcaaagggaaaggg

SEQ ID NO: 15454 - RNA, 20 nt, synthetic construct
  misc_feature 1..20: note = C9Orf72 GTCN PAM targeting sequence
  source 1..20: mol_type = other RNA
tgcgtctgcaagatcaaagg

SEQ ID NO: 15455 - RNA, 20 nt, synthetic construct
  misc_feature 1..20: note = C9Orf72 GTCN PAM targeting sequence
  source 1..20: mol_type = other RNA
tcacctctccattttgtgtg

SEQ ID NO: 15456 - RNA, 20 nt, synthetic construct
  misc_feature 1..20: note = C9Orf72 GTCN PAM targeting sequence
  source 1..20: mol_type = other RNA
tcctggattttcccagtttg

SEQ ID NO: 15457 - RNA, 20 nt, synthetic construct
  misc_feature 1..20: note = C9Orf72 GTCN PAM targeting sequence
  source 1..20: mol_type = other RNA
ctgcaaacaactctaatagt

SEQ ID NO: 15458 - RNA, 20 nt, synthetic construct
  misc_feature 1..20: note = C9Orf72 GTCN PAM targeting sequence
  source 1..20: mol_type = other RNA
aaccaacctagtcttgaatt

SEQ ID NO: 15459 - RNA, 20 nt, synthetic construct
  misc_feature 1..20: note = C9Orf72 GTCN PAM targeting sequence
  source 1..20: mol_type = other RNA
tgaattctggctcaatcact

SEQ ID NO: 15460 - RNA, 20 nt, synthetic construct
  misc_feature 1..20: note = C9Orf72 GTCN PAM targeting sequence
  source 1..20: mol_type = other RNA
accatgtgataatagtagct

SEQ ID NO: 15461 - RNA, 20 nt, synthetic construct
  misc_feature 1..20: note = C9Orf72 GTCN PAM targeting sequence
  source 1..20: mol_type = other RNA
cctcgagtaaatctctttcc

SEQ ID NO: 15462 - RNA, 20 nt, synthetic construct
  misc_feature 1..20: note = C9Orf72 GTCN PAM targeting sequence
  source 1..20: mol_type = other RNA
ttctcatcactagactgaaa

SEQ ID NO: 15463 - RNA, 20 nt, synthetic construct
  misc_feature 1..20: note = C9Orf72 GTCN PAM targeting sequence
  source 1..20: mol_type = other RNA
agtgatgagaaagacgtata

SEQ ID NO: 15464 - RNA, 20 nt, synthetic construct
  misc_feature 1..20: note = C9Orf72 GTCN PAM targeting sequence
  source 1..20: mol_type = other RNA
gattcactttcgtctgcgct

SEQ ID NO: 15465 - RNA, 20 nt, synthetic construct
  misc_feature 1..20: note = C9Orf72 GTCN PAM targeting sequence
  source 1..20: mol_type = other RNA
gcgcttttcctctaagcaca

SEQ ID NO: 15466 - RNA, 20 nt, synthetic construct
  misc_feature 1..20: note = C9Orf72 GTCN PAM targeting sequence
  source 1..20: mol_type = other RNA
ttaataaatgttggatgtaa

SEQ ID NO: 15467 - RNA, 20 nt, synthetic construct
  misc_feature 1..20: note = C9Orf72 GTCN PAM targeting sequence
  source 1..20: mol_type = other RNA
cctaaaaatgcaataatgtt

SEQ ID NO: 15468 - RNA, 20 nt, synthetic construct
  misc_feature 1..20: note = C9Orf72 GTCN PAM targeting sequence
  source 1..20: mol_type = other RNA
aattccattacttctgtaaa

SEQ ID NO: 15469 - RNA, 20 nt, synthetic construct
  misc_feature 1..20: note = C9Orf72 GTCN PAM targeting sequence
  source 1..20: mol_type = other RNA
caggtagtaagtctgcttac

SEQ ID NO: 15470 - RNA, 20 nt, synthetic construct
  misc_feature 1..20: note = C9Orf72 GTCN PAM targeting sequence
  source 1..20: mol_type = other RNA
gcttacaaaaacctaagaag

SEQ ID NO: 15471 - RNA, 20 nt, synthetic construct
  misc_feature 1..20: note = C9Orf72 GTCN PAM targeting sequence
  source 1..20: mol_type = other RNA
tgttattgtttttcatctca

SEQ ID NO: 15472 - RNA, 20 nt, synthetic construct
  misc_feature 1..20: note = C9Orf72 GTCN PAM targeting sequence
  source 1..20: mol_type = other RNA
ccttaaatagcttgcctggg

SEQ ID NO: 15473 - RNA, 20 nt, synthetic construct
  misc_feature 1..20: note = C9Orf72 GTCN PAM targeting sequence
  source 1..20: mol_type = other RNA
attttgtcctatttaagatt

SEQ ID NO: 15474 - RNA, 20 nt, synthetic construct
  misc_feature 1..20: note = C9Orf72 GTCN PAM targeting sequence
  source 1..20: mol_type = other RNA
tatttaagattgtgcaaagt

SEQ ID NO: 15475 - RNA, 20 nt, synthetic construct
  misc_feature 1..20: note = C9Orf72 GTCN PAM targeting sequence
  source 1..20: mol_type = other RNA
ataatttatgtgaaactttg

SEQ ID NO: 15476 - RNA, 20 nt, synthetic construct
  misc_feature 1..20: note = C9Orf72 GTCN PAM targeting sequence
  source 1..20: mol_type = other RNA
ctgtgtctataatttatgtg

SEQ ID NO: 15477 - RNA, 20 nt, synthetic construct
  misc_feature 1..20: note = C9Orf72 GTCN PAM targeting sequence
  source 1..20: mol_type = other RNA
atattccatgtgcaggatat

SEQ ID NO: 15478 - RNA, 20 nt, synthetic construct
  misc_feature 1..20: note = C9Orf72 GTCN PAM targeting sequence
  source 1..20: mol_type = other RNA
gaggtgatcagcaatgtttg

SEQ ID NO: 15479 - RNA, 20 nt, synthetic construct
  misc_feature 1..20: note = C9Orf72 GTCN PAM targeting sequence
  source 1..20: mol_type = other RNA
tcagaggtgatcagcaatgt

SEQ ID NO: 15480 - RNA, 20 nt, synthetic construct
  misc_feature 1..20: note = C9Orf72 GTCN PAM targeting sequence
  source 1..20: mol_type = other RNA
tttcccatgcagcatcttca

SEQ ID NO: 15481 - RNA, 20 nt, synthetic construct
  misc_feature 1..20: note = C9Orf72 GTCN PAM targeting sequence
  source 1..20: mol_type = other RNA
cctgatttataatgtatagt

SEQ ID NO: 15482 - RNA, 20 nt, synthetic construct
  misc_feature 1..20: note = C9Orf72 GTCN PAM targeting sequence
  source 1..20: mol_type = other RNA
atttgataaagagcagatac

SEQ ID NO: 15483 - RNA, 20 nt, synthetic construct
  misc_feature 1..20: note = C9Orf72 GTCN PAM targeting sequence
  source 1..20: mol_type = other RNA
aattaaaaaaaaaagaacaa

SEQ ID NO: 15484 - RNA, 20 nt, synthetic construct
  misc_feature 1..20: note = C9Orf72 GTCN PAM targeting sequence
  source 1..20: mol_type = other RNA
ttgtggaaaaaacaccataa

SEQ ID NO: 15485 - RNA, 20 nt, synthetic construct
  misc_feature 1..20: note = C9Orf72 GTCN PAM targeting sequence
  source 1..20: mol_type = other RNA
agggtagcttatacatagtc

SEQ ID NO: 15486 - RNA, 20 nt, synthetic construct
  misc_feature 1..20: note = C9Orf72 GTCN PAM targeting sequence
  source 1..20: mol_type = other RNA
agctcagtttgccaagtgtt

SEQ ID NO: 15487 - RNA, 20 nt, synthetic construct
  misc_feature 1..20: note = C9Orf72 GTCN PAM targeting sequence
  source 1..20: mol_type = other RNA
ttagagtacaaaattacttc

SEQ ID NO: 15488 - RNA, 20 nt, synthetic construct
  misc_feature 1..20: note = C9Orf72 GTCN PAM targeting sequence
  source 1..20: mol_type = other RNA
cactgtcactttctgcatta

SEQ ID NO: 15489 - RNA, 20 nt, synthetic construct
  misc_feature 1..20: note = C9Orf72 GTCN PAM targeting sequence
  source 1..20: mol_type = other RNA
ctttctgcattacaaacacc

SEQ ID NO: 15490 - RNA, 20 nt, synthetic construct
  misc_feature 1..20: note = C9Orf72 GTCN PAM targeting sequence
  source 1..20: mol_type = other RNA
cctaagttagcaaaactcca

SEQ ID NO: 15491 - RNA, 20 nt, synthetic construct
  misc_feature 1..20: note = C9Orf72 GTCN PAM targeting sequence
  source 1..20: mol_type = other RNA
cactctcactctgttgccca

SEQ ID NO: 15492 - RNA, 20 nt, synthetic construct
  misc_feature 1..20: note = C9Orf72 GTCN PAM targeting sequence
  source 1..20: mol_type = other RNA
cccgagtagctgggactata

SEQ ID NO: 15493 - RNA, 20 nt, synthetic construct
  misc_feature 1..20: note = C9Orf72 GTCN PAM targeting sequence
  source 1..20: mol_type = other RNA
cagctactcgggagactgag

SEQ ID NO: 15494 - RNA, 20 nt, synthetic construct
  misc_feature 1..20: note = C9Orf72 GTCN PAM targeting sequence
  source 1..20: mol_type = other RNA
tgaactcctggcctcaagtg

SEQ ID NO: 15495 - RNA, 20 nt, synthetic construct
  misc_feature 1..20: note = C9Orf72 GTCN PAM targeting sequence
  source 1..20: mol_type = other RNA
cttgtttatgattactaaat

SEQ ID NO: 15496 - RNA, 20 nt, synthetic construct
  misc_feature 1..20: note = C9Orf72 GTCN PAM targeting sequence
  source 1..20: mol_type = other RNA
tttaataatgaggccactga

SEQ ID NO: 15497 - RNA, 20 nt, synthetic construct
  misc_feature 1..20: note = C9Orf72 GTCN PAM targeting sequence
  source 1..20: mol_type = other RNA
tctaagcctgcactataaag

SEQ ID NO: 15498 - RNA, 20 nt, synthetic construct
  misc_feature 1..20: note = C9Orf72 GTCN PAM targeting sequence
  source 1..20: mol_type = other RNA
acaagatgattaaatagtat

SEQ ID NO: 15499 - RNA, 20 nt, synthetic construct
  misc_feature 1..20: note = C9Orf72 GTCN PAM targeting sequence
  source 1..20: mol_type = other RNA
ccctgccttacattagtttg

SEQ ID NO: 15500 - RNA, 20 nt, synthetic construct
  misc_feature 1..20: note = C9Orf72 GTCN PAM targeting sequence
  source 1..20: mol_type = other RNA
cagaaccctgtaaacaagat

SEQ ID NO: 15501 - RNA, 20 nt, synthetic construct
  misc_feature 1..20: note = C9Orf72 GTCN PAM targeting sequence
  source 1..20: mol_type = other RNA
gtgtgttgaagagatgagat

SEQ ID NO: 15502 - RNA, 20 nt, synthetic construct
  misc_feature 1..20: note = C9Orf72 GTCN PAM targeting sequence
  source 1..20: mol_type = other RNA
tgagagtcatgatggaatga

SEQ ID NO: 15503 - RNA, 20 nt, synthetic construct
  misc_feature 1..20: note = C9Orf72 GTCN PAM targeting sequence
  source 1..20: mol_type = other RNA
tgatggaatgactcctttaa

SEQ ID NO: 15504 - RNA, 20 nt, synthetic construct
  misc_feature 1..20: note = C9Orf72 GTCN PAM targeting sequence
  source 1..20: mol_type = other RNA
ttccatcatgactctcagga

SEQ ID NO: 15505 - RNA, 20 nt, synthetic construct
  misc_feature 1..20: note = C9Orf72 GTCN PAM targeting sequence
  source 1..20: mol_type = other RNA
tacagttacaaagcggtttc

SEQ ID NO: 15506 - RNA, 20 nt, synthetic construct
  misc_feature 1..20: note = C9Orf72 GTCN PAM targeting sequence
  source 1..20: mol_type = other RNA
atgaaagcggtcaaagggaa

SEQ ID NO: 15507 - RNA, 20 nt, synthetic construct
  misc_feature 1..20: note = C9Orf72 GTCN PAM targeting sequence
  source 1..20: mol_type = other RNA
aagggaaaaaccttcctcag

SEQ ID NO: 15508 - RNA, 20 nt, synthetic construct
  misc_feature 1..20: note = C9Orf72 GTCN PAM targeting sequence
  source 1..20: mol_type = other RNA
ttattttattcctttccaat

SEQ ID NO: 15509 - RNA, 20 nt, synthetic construct
  misc_feature 1..20: note = C9Orf72 GTCN PAM targeting sequence
  source 1..20: mol_type = other RNA
tcaagtctttattttattcc

SEQ ID NO: 15510 - RNA, 20 nt, synthetic construct
  misc_feature 1..20: note = C9Orf72 GTCN PAM targeting sequence
  source 1..20: mol_type = other RNA
tctttggtacttccttaaaa

SEQ ID NO: 15511 - RNA, 20 nt, synthetic construct
  misc_feature 1..20: note = C9Orf72 GTCN PAM targeting sequence
  source 1..20: mol_type = other RNA
atttacacatccagttagtt

SEQ ID NO: 15512 - RNA, 20 nt, synthetic construct
  misc_feature 1..20: note = C9Orf72 GTCN PAM targeting sequence
  source 1..20: mol_type = other RNA
agcaaagacagccaactgtt

SEQ ID NO: 15513 - RNA, 20 nt, synthetic construct
  misc_feature 1..20: note = C9Orf72 GTCN PAM targeting sequence
  source 1..20: mol_type = other RNA
ttgcttgaccaaaacttggt

SEQ ID NO: 15514 - RNA, 20 nt, synthetic construct
  misc_feature 1..20: note = C9Orf72 GTCN PAM targeting sequence
  source 1..20: mol_type = other RNA
catggttggagaggatttat

SEQ ID NO: 15515 - RNA, 20 nt, synthetic construct
  misc_feature 1..20: note = C9Orf72 GTCN PAM targeting sequence
  source 1..20: mol_type = other RNA
gtaacacaaagaagcaataa

SEQ ID NO: 15516 - RNA, 20 nt, synthetic construct
  misc_feature 1..20: note = C9Orf72 GTCN PAM targeting sequence
  source 1..20: mol_type = other RNA
gatgaataatttgcaaatat

SEQ ID NO: 15517 - RNA, 20 nt, synthetic construct
  misc_feature 1..20: note = C9Orf72 GTCN PAM targeting sequence
  source 1..20: mol_type = other RNA
attcagatctttgcccattt

SEQ ID NO: 15518 - RNA, 20 nt, synthetic construct
  misc_feature 1..20: note = C9Orf72 GTCN PAM targeting sequence
  source 1..20: mol_type = other RNA
tctcttgaaaaatgtctatt

SEQ ID NO: 15519 - RNA, 20 nt, synthetic construct
  misc_feature 1..20: note = C9Orf72 GTCN PAM targeting sequence
  source 1..20: mol_type = other RNA
tttgaacaaatgccattatc

SEQ ID NO: 15520 - RNA, 20 nt, synthetic construct
  misc_feature 1..20: note = C9Orf72 GTCN PAM targeting sequence
  source 1..20: mol_type = other RNA
aaagtttttcttaacaggtg

SEQ ID NO: 15521 - RNA, 20 nt, synthetic construct
  misc_feature 1..20: note = C9Orf72 GTCN PAM targeting sequence
  source 1..20: mol_type = other RNA
cttgctagttatctctttat

SEQ ID NO: 15522 - RNA, 20 nt, synthetic construct
  misc_feature 1..20: note = C9Orf72 GTCN PAM targeting sequence
  source 1..20: mol_type = other RNA
tatttatgctaggtctgaag

SEQ ID NO: 15523 - RNA, 20 nt, synthetic construct
  misc_feature 1..20: note = C9Orf72 GTCN PAM targeting sequence
  source 1..20: mol_type = other RNA
gaaggagagaggtgcaaagt

SEQ ID NO: 15524 - RNA, 20 nt, synthetic construct
  misc_feature 1..20: note = C9Orf72 GTCN PAM targeting sequence
  source 1..20: mol_type = other RNA
ttcactttgcacctctctcc

SEQ ID NO: 15525 - RNA, 20 nt, synthetic construct
  misc_feature 1..20: note = C9Orf72 GTCN PAM targeting sequence
  source 1..20: mol_type = other RNA
tgtctttcactttgcacctc

SEQ ID NO: 15526 - RNA, 20 nt, synthetic construct
  misc_feature 1..20: note = C9Orf72 GTCN PAM targeting sequence
  source 1..20: mol_type = other RNA
ggcacatagatgctcataaa

SEQ ID NO: 15527 - RNA, 20 nt, synthetic construct
  misc_feature 1..20: note = C9Orf72 GTCN PAM targeting sequence
  source 1..20: mol_type = other RNA
tcatccactcaattactctt

SEQ ID NO: 15528 - RNA, 20 nt, synthetic construct
  misc_feature 1..20: note = C9Orf72 GTCN PAM targeting sequence
  source 1..20: mol_type = other RNA
aaaaaagaagggtgatataa

SEQ ID NO: 15529 - RNA, 20 nt, synthetic construct
  misc_feature 1..20: note = C9Orf72 GTCN PAM targeting sequence
  source 1..20: mol_type = other RNA
tacactttatggctaattat

SEQ ID NO: 15530 - RNA, 20 nt, synthetic construct
  misc_feature 1..20: note = C9Orf72 GTCN PAM targeting sequence
  source 1..20: mol_type = other RNA
tccttccatgtcagcgcata

SEQ ID NO: 15531 - RNA, 20 nt, synthetic construct
  misc_feature 1..20: note = C9Orf72 GTCN PAM targeting sequence
  source 1..20: mol_type = other RNA
gcgcatagagaacttcctct

SEQ ID NO: 15532 - RNA, 20 nt, synthetic construct
  misc_feature 1..20: note = C9Orf72 GTCN PAM targeting sequence
  source 1..20: mol_type = other RNA
aaaaaaaaaaaaaagaggaa

SEQ ID NO: 15533 - RNA, 20 nt, synthetic construct
  misc_feature 1..20: note = C9Orf72 GTCN PAM targeting sequence
  source 1..20: mol_type = other RNA
cgctctgtcgcccaggctgg

SEQ ID NO: 15534 - RNA, 20 nt, synthetic construct
  misc_feature 1..20: note = C9Orf72 GTCN PAM targeting sequence
  source 1..20: mol_type = other RNA
cccaggctggatggagtgca

SEQ ID NO: 15535 - RNA, 20 nt, synthetic construct
  misc_feature 1..20: note = C9Orf72 GTCN PAM targeting sequence
  source 1..20: mol_type = other RNA
cagctattcgggaggctgag

SEQ ID NO: 15536 - RNA, 20 nt, synthetic construct
  misc_feature 1..20: note = C9Orf72 GTCN PAM targeting sequence
  source 1..20: mol_type = other RNA
ctactaaaaacaatacaaaa

SEQ ID NO: 15537 - RNA, 20 nt, synthetic construct
  misc_feature 1..20: note = C9Orf72 GTCN PAM targeting sequence
  source 1..20: mol_type = other RNA
tgatctcctgacctcgtgat

SEQ ID NO: 15538 - RNA, 20 nt, synthetic construct
  misc_feature 1..20: note = C9Orf72 GTCN PAM targeting sequence
  source 1..20: mol_type = other RNA
ggagatcaagaccatcctgg

SEQ ID NO: 15539 - RNA, 20 nt, synthetic construct
  misc_feature 1..20: note = C9Orf72 GTCN PAM targeting sequence
  source 1..20: mol_type = other RNA
tgaaaccagtccctgtgtga

SEQ ID NO: 15540 - RNA, 20 nt, synthetic construct
  misc_feature 1..20: note = C9Orf72 GTCN PAM targeting sequence
  source 1..20: mol_type = other RNA
ctgtgtgatggatggatata

SEQ ID NO: 15541 - RNA, 20 nt, synthetic construct
  misc_feature 1..20: note = C9Orf72 GTCN PAM targeting sequence
  source 1..20: mol_type = other RNA
ttcattacagaattgtttgt

SEQ ID NO: 15542 - RNA, 20 nt, synthetic construct
  misc_feature 1..20: note = C9Orf72 GTCN PAM targeting sequence
  source 1..20: mol_type = other RNA
tgatatcgttccttaggtga

SEQ ID NO: 15543 - RNA, 20 nt, synthetic construct
  misc_feature 1..20: note = C9Orf72 GTCN PAM targeting sequence
  source 1..20: mol_type = other RNA
cctcactcccttaattgtcc

SEQ ID NO: 15544 - RNA, 20 nt, synthetic construct
  misc_feature 1..20: note = C9Orf72 GTCN PAM targeting sequence
  source 1..20: mol_type = other RNA
ctgtggaaagtgaggatccc

SEQ ID NO: 15545 - RNA, 20 nt, synthetic construct
  misc_feature 1..20: note = C9Orf72 GTCN PAM targeting sequence
  source 1..20: mol_type = other RNA
ctgggcctctagactgacat

SEQ ID NO: 15546 - RNA, 20 nt, synthetic construct
  misc_feature 1..20: note = C9Orf72 GTCN PAM targeting sequence
  source 1..20: mol_type = other RNA
agaggcccagggacacggat

SEQ ID NO: 15547 - RNA, 20 nt, synthetic construct
  misc_feature 1..20: note = C9Orf72 GTCN PAM targeting sequence
  source 1..20: mol_type = other RNA
gtctagaggcccagggacac

SEQ ID NO: 15548 - RNA, 20 nt, synthetic construct
  misc_feature 1..20: note = C9Orf72 GTCN PAM targeting sequence
  source 1..20: mol_type = other RNA
acaggaagtcccacaggcct

SEQ ID NO: 15549 - RNA, 20 nt, synthetic construct
  misc_feature 1..20: note = C9Orf72 GTCN PAM targeting sequence
  source 1..20: mol_type = other RNA
cacaggccttggacctggag

SEQ ID NO: 15550 - RNA, 20 nt, synthetic construct
  misc_feature 1..20: note = C9Orf72 GTCN PAM targeting sequence
  source 1..20: mol_type = other RNA
aaggcctgtgggacttcctg

SEQ ID NO: 15551 - RNA, 20 nt, synthetic construct
  misc_feature 1..20: note = C9Orf72 GTCN PAM targeting sequence
  source 1..20: mol_type = other RNA
catgccagctgccatagccc

SEQ ID NO: 15552 - RNA, 20 nt, synthetic construct
  misc_feature 1..20: note = C9Orf72 GTCN PAM targeting sequence
  source 1..20: mol_type = other RNA
gatgatggggagtgaagcaa

SEQ ID NO: 15553 - RNA, 20 nt, synthetic construct
  misc_feature 1..20: note = C9Orf72 GTCN PAM targeting sequence
  source 1..20: mol_type = other RNA
aactgatttccagggtaaca

SEQ ID NO: 15554 - RNA, 20 nt, synthetic construct
  misc_feature 1..20: note = C9Orf72 GTCN PAM targeting sequence
  source 1..20: mol_type = other RNA
ctcaacccactgtccaactg

SEQ ID NO: 15555 - RNA, 20 nt, synthetic construct
  misc_feature 1..20: note = C9Orf72 GTCN PAM targeting sequence
  source 1..20: mol_type = other RNA
cacccctctcagtgttctga

SEQ ID NO: 15556 - RNA, 20 nt, synthetic construct
  misc_feature 1..20: note = C9Orf72 GTCN PAM targeting sequence
  source 1..20: mol_type = other RNA
atgaacccagctgtctcacc

SEQ ID NO: 15557 - RNA, 20 nt, synthetic construct
  misc_feature 1..20: note = C9Orf72 GTCN PAM targeting sequence
  source 1..20: mol_type = other RNA
attttccagccgcagcctct

SEQ ID NO: 15558 - RNA, 20 nt, synthetic construct
  misc_feature 1..20: note = C9Orf72 GTCN PAM targeting sequence
  source 1..20: mol_type = other RNA
tgggctgcagggtgccctca

SEQ ID NO: 15559 - RNA, 20 nt, synthetic construct
  misc_feature 1..20: note = C9Orf72 GTCN PAM targeting sequence
  source 1..20: mol_type = other RNA
tctctccctaccaccacaga

SEQ ID NO: 15560 - RNA, 20 nt, synthetic construct
  misc_feature 1..20: note = C9Orf72 GTCN PAM targeting sequence
  source 1..20: mol_type = other RNA
tcagtagtgctctgtggtgg

SEQ ID NO: 15561 - RNA, 20 nt, synthetic construct
  misc_feature 1..20: note = C9Orf72 GTCN PAM targeting sequence
  source 1..20: mol_type = other RNA
acagctcttttgtattttgg

SEQ ID NO: 15562 - RNA, 20 nt, synthetic construct
  misc_feature 1..20: note = C9Orf72 GTCN PAM targeting sequence
  source 1..20: mol_type = other RNA
tttggggtgcaatccagtag

SEQ ID NO: 15563 - RNA, 20 nt, synthetic construct
  misc_feature 1..20: note = C9Orf72 GTCN PAM targeting sequence
  source 1..20: mol_type = other RNA
gttggcttcattctgagtgc

SEQ ID NO: 15564 - RNA, 20 nt, synthetic construct
  misc_feature 1..20: note = C9Orf72 GTCN PAM targeting sequence
  source 1..20: mol_type = other RNA
tctcaagaactctagcaatt

SEQ ID NO: 15565 - RNA, 20 nt, synthetic construct
  misc_feature 1..20: note = C9Orf72 GTCN PAM targeting sequence
  source 1..20: mol_type = other RNA
ccttacctccagacaaacac

SEQ ID NO: 15566 - RNA, 20 nt, synthetic construct
  misc_feature 1..20: note = C9Orf72 GTCN PAM targeting sequence
  source 1..20: mol_type = other RNA
ggaggtaaggagacaccagc

SEQ ID NO: 15567 - RNA, 20 nt, synthetic construct
  misc_feature 1..20: note = C9Orf72 GTCN PAM targeting sequence
  source 1..20: mol_type = other RNA
tccagcaaaggattttaacc

SEQ ID NO: 15568 - RNA, 20 nt, synthetic construct
  misc_feature 1..20: note = C9Orf72 GTCN PAM targeting sequence
  source 1..20: mol_type = other RNA
ttttaatctggttaaaatcc

SEQ ID NO: 15569 - RNA, 20 nt, synthetic construct
  misc_feature 1..20: note = C9Orf72 GTCN PAM targeting sequence
  source 1..20: mol_type = other RNA
tttgagtcattttaatctgg

SEQ ID NO: 15570 - RNA, 20 nt, synthetic construct
  misc_feature 1..20: note = C9Orf72 GTCN PAM targeting sequence
  source 1..20: mol_type = other RNA
gaggcattaacagcagaaca

SEQ ID NO: 15571 - RNA, 20 nt, synthetic construct
  misc_feature 1..20: note = C9Orf72 GTCN PAM targeting sequence
  source 1..20: mol_type = other RNA
gttctgctgttaatgcctct

SEQ ID NO: 15572 - RNA, 20 nt, synthetic construct
  misc_feature 1..20: note = C9Orf72 GTCN PAM targeting sequence
  source 1..20: mol_type = other RNA
tcaaactctgagattctttc

SEQ ID NO: 15573 - RNA, 20 nt, synthetic construct
  misc_feature 1..20: note = C9Orf72 GTCN PAM targeting sequence
  source 1..20: mol_type = other RNA
aaccaagttgattcaaataa

SEQ ID NO: 15574 - RNA, 20 nt, synthetic construct
  misc_feature 1..20: note = C9Orf72 GTCN PAM targeting sequence
  source 1..20: mol_type = other RNA
ctttacataacctcataaat

SEQ ID NO: 15575 - RNA, 20 nt, synthetic construct
  misc_feature 1..20: note = C9Orf72 GTCN PAM targeting sequence
  source 1..20: mol_type = other RNA
atgactcacagtcattcctg

SEQ ID NO: 15576 - RNA, 20 nt, synthetic construct
  misc_feature 1..20: note = C9Orf72 GTCN PAM targeting sequence
  source 1..20: mol_type = other RNA
tagacttggtctctttacat

SEQ ID NO: 15577 - RNA, 20 nt, synthetic construct
  misc_feature 1..20: note = C9Orf72 GTCN PAM targeting sequence
  source 1..20: mol_type = other RNA
ttcctgagaaagagagtaag

SEQ ID NO: 15578 - RNA, 20 nt, synthetic construct
  misc_feature 1..20: note = C9Orf72 GTCN PAM targeting sequence
  source 1..20: mol_type = other RNA
atgaaaatttcccctatctc

SEQ ID NO: 15579 - RNA, 20 nt, synthetic construct
  misc_feature 1..20: note = C9Orf72 GTCN PAM targeting sequence
  source 1..20: mol_type = other RNA
cacaggagttctctgtattt

SEQ ID NO: 15580 - RNA, 20 nt, synthetic construct
  misc_feature 1..20: note = C9Orf72 GTCN PAM targeting sequence
  source 1..20: mol_type = other RNA
tgtatagtgtctcacaggag

SEQ ID NO: 15581 - RNA, 20 nt, synthetic construct
  misc_feature 1..20: note = C9Orf72 GTCN PAM targeting sequence
  source 1..20: mol_type = other RNA
catagtcatcagattcacca

SEQ ID NO: 15582 - RNA, 20 nt, synthetic construct
  misc_feature 1..20: note = C9Orf72 GTCN PAM targeting sequence
  source 1..20: mol_type = other RNA
tcagattcaccaaggtcaat

SEQ ID NO: 15583 - RNA, 20 nt, synthetic construct
  misc_feature 1..20: note = C9Orf72 GTCN PAM targeting sequence
  source 1..20: mol_type = other RNA
atgcaaaagaaaaaattgtt

SEQ ID NO: 15584 - RNA, 20 nt, synthetic construct
  misc_feature 1..20: note = C9Orf72 GTCN PAM targeting sequence
  source 1..20: mol_type = other RNA
ggtcacctacaaaaagaacc

SEQ ID NO: 15585 - RNA, 20 nt, synthetic construct
  misc_feature 1..20: note = C9Orf72 GTCN PAM targeting sequence
  source 1..20: mol_type = other RNA
cctacaaaaagaacctcatc

SEQ ID NO: 15586 - RNA, 20 nt, synthetic construct
  misc_feature 1..20: note = C9Orf72 GTCN PAM targeting sequence
  source 1..20: mol_type = other RNA
gcagaaaccttacaagccag

SEQ ID NO: 15587 - RNA, 20 nt, synthetic construct
  misc_feature 1..20: note = C9Orf72 GTCN PAM targeting sequence
  source 1..20: mol_type = other RNA
gagaaggattgtatttctcc

SEQ ID NO: 15588 - RNA, 20 nt, synthetic construct
  misc_feature 1..20: note = C9Orf72 GTCN PAM targeting sequence
  source 1..20: mol_type = other RNA
ttcatttccatgtttagcaa

SEQ ID NO: 15589 - RNA, 20 nt, synthetic construct
  misc_feature 1..20: note = C9Orf72 GTCN PAM targeting sequence
  source 1..20: mol_type = other RNA
acaaaacaaccagctaaaca

SEQ ID NO: 15590 - RNA, 20 nt, synthetic construct
  misc_feature 1..20: note = C9Orf72 GTCN PAM targeting sequence
  source 1..20: mol_type = other RNA
ttgtgttgtttagctggttg

SEQ ID NO: 15591 - RNA, 20 nt, synthetic construct
  misc_feature 1..20: note = C9Orf72 GTCN PAM targeting sequence
  source 1..20: mol_type = other RNA
atgctaaccctaaatgtaaa

SEQ ID NO: 15592 - RNA, 20 nt, synthetic construct
  misc_feature 1..20: note = C9Orf72 GTCN PAM targeting sequence
  source 1..20: mol_type = other RNA
acactctccctttaaaatgc

SEQ ID NO: 15593 - RNA, 20 nt, synthetic construct
  misc_feature 1..20: note = C9Orf72 GTCN PAM targeting sequence
  source 1..20: mol_type = other RNA
ttttatccagcttaccactt

SEQ ID NO: 15594 - RNA, 20 nt, synthetic construct
  misc_feature 1..20: note = C9Orf72 GTCN PAM targeting sequence
  source 1..20: mol_type = other RNA
tgtctttttatccagcttac

SEQ ID NO: 15595 - RNA, 20 nt, synthetic construct
  misc_feature 1..20: note = C9Orf72 GTCN PAM targeting sequence
  source 1..20: mol_type = other RNA
gctgttttcagaagatgcat

SEQ ID NO: 15596 - RNA, 20 nt, synthetic construct
  misc_feature 1..20: note = C9Orf72 GTCN PAM targeting sequence
  source 1..20: mol_type = other RNA
ttcatgtaggatgcatcttc

SEQ ID NO: 15597 - RNA, 20 nt, synthetic construct
  misc_feature 1..20: note = C9Orf72 GTCN PAM targeting sequence
  source 1..20: mol_type = other RNA
ttcctgattgttgttggttt

SEQ ID NO: 15598 - RNA, 20 nt, synthetic construct
  misc_feature 1..20: note = C9Orf72 GTCN PAM targeting sequence
  source 1..20: mol_type = other RNA
ttttgttcaattgaaccttt

SEQ ID NO: 15599 - RNA, 20 nt, synthetic construct
  misc_feature 1..20: note = C9Orf72 GTCN PAM targeting sequence
  source 1..20: mol_type = other RNA
aatgctatcagtggagtgat

SEQ ID NO: 15600 - RNA, 20 nt, synthetic construct
  misc_feature 1..20: note = C9Orf72 GTCN PAM targeting sequence
  source 1..20: mol_type = other RNA
gttttctgcctcagtgatct

SEQ ID NO: 15601 - RNA, 20 nt, synthetic construct
  misc_feature 1..20: note = C9Orf72 GTCN PAM targeting sequence
  source 1..20: mol_type = other RNA
agtttaattccagaattcct

SEQ ID NO: 15602 - RNA, 20 nt, synthetic construct
  misc_feature 1..20: note = C9Orf72 GTCN PAM targeting sequence
  source 1..20: mol_type = other RNA
agtgtcaagtttaattccag

SEQ ID NO: 15603 - RNA, 20 nt, synthetic construct
  misc_feature 1..20: note = C9Orf72 GTCN PAM targeting sequence
  source 1..20: mol_type = other RNA
aactggtcaagtgtcaagtt

SEQ ID NO: 15604 - RNA, 20 nt, synthetic construct
  misc_feature 1..20: note = C9Orf72 GTCN PAM targeting sequence
  source 1..20: mol_type = other RNA
attaggtccaactggtcaag

SEQ ID NO: 15605 - RNA, 20 nt, synthetic construct
  misc_feature 1..20: note = C9Orf72 GTCN PAM targeting sequence
  source 1..20: mol_type = other RNA
ttgttggcttgagtatccta

SEQ ID NO: 15606 - RNA, 20 nt, synthetic construct
  misc_feature 1..20: note = C9Orf72 GTCN PAM targeting sequence
  source 1..20: mol_type = other RNA
taaagcaagtctcaataaat

SEQ ID NO: 15607 - RNA, 20 nt, synthetic construct
  misc_feature 1..20: note = C9Orf72 GTCN PAM targeting sequence
  source 1..20: mol_type = other RNA
caataaattaaaaaaaatta

SEQ ID NO: 15608 - RNA, 20 nt, synthetic construct
  misc_feature 1..20: note = C9Orf72 GTCN PAM targeting sequence
  source 1..20: mol_type = other RNA
ctattttcattaatttcaaa

SEQ ID NO: 15609 - RNA, 20 nt, synthetic construct
  misc_feature 1..20: note = C9Orf72 GTCN PAM targeting sequence
  source 1..20: mol_type = other RNA
tttcctctgctagctgtgag

SEQ ID NO: 15610 - RNA, 20 nt, synthetic construct
  misc_feature 1..20: note = C9Orf72 GTCN PAM targeting sequence
  source 1..20: mol_type = other RNA
ttatctgattttagttatgt

SEQ ID NO: 15611 - RNA, 20 nt, synthetic construct
  misc_feature 1..20: note = C9Orf72 GTCN PAM targeting sequence
  source 1..20: mol_type = other RNA
ataaaatgttagtgaaacaa

SEQ ID NO: 15612 - RNA, 20 nt, synthetic construct
  misc_feature 1..20: note = C9Orf72 GTCN PAM targeting sequence
  source 1..20: mol_type = other RNA
tgtttattcttatgaaaaac

SEQ ID NO: 15613 - RNA, 20 nt, synthetic construct
  misc_feature 1..20: note = C9Orf72 GTCN PAM targeting sequence
  source 1..20: mol_type = other RNA
attagtcttgtttattctta

SEQ ID NO: 15614 - RNA, 20 nt, synthetic construct
  misc_feature 1..20: note = C9Orf72 GTCN PAM targeting sequence
  source 1..20: mol_type = other RNA
gtttttcctcgtttttctag

SEQ ID NO: 15615 - RNA, 20 nt, synthetic construct
  misc_feature 1..20: note = C9Orf72 GTCN PAM targeting sequence
  source 1..20: mol_type = other RNA
tttcttgtgctttttggaac

SEQ ID NO: 15616 - RNA, 20 nt, synthetic construct
  misc_feature 1..20: note = C9Orf72 GTCN PAM targeting sequence
  source 1..20: mol_type = other RNA
tttttgtcatttcttgtgct

SEQ ID NO: 15617 - RNA, 20 nt, synthetic construct
  misc_feature 1..20: note = C9Orf72 GTCN PAM targeting sequence
  source 1..20: mol_type = other RNA
taatgtcatttttgtcattt

SEQ ID NO: 15618 - RNA, 20 nt, synthetic construct
  misc_feature 1..20: note = C9Orf72 GTCN PAM targeting sequence
  source 1..20: mol_type = other RNA
ctgaaaatctttggcatttc

SEQ ID NO: 15619 - RNA, 20 nt, synthetic construct
  misc_feature 1..20: note = C9Orf72 GTCN PAM targeting sequence
  source 1..20: mol_type = other RNA
tggttcaatcttgggaggtt

SEQ ID NO: 15620 - RNA, 20 nt, synthetic construct
  misc_feature 1..20: note = C9Orf72 GTCN PAM targeting sequence
  source 1..20: mol_type = other RNA
gttcaagttttcacttccgt

SEQ ID NO: 15621 - RNA, 20 nt, synthetic construct
  misc_feature 1..20: note = C9Orf72 GTCN PAM targeting sequence
  source 1..20: mol_type = other RNA
agggctaaatttggttggta

SEQ ID NO: 15622 - RNA, 20 nt, synthetic construct
  misc_feature 1..20: note = C9Orf72 GTCN PAM targeting sequence
  source 1..20: mol_type = other RNA
ctggcagattttgatatcag

SEQ ID NO: 15623 - RNA, 20 nt, synthetic construct
  misc_feature 1..20: note = C9Orf72 GTCN PAM targeting sequence
  source 1..20: mol_type = other RNA
tgaagttttcttttttcatt

SEQ ID NO: 15624 - RNA, 20 nt, synthetic construct
  misc_feature 1..20: note = C9Orf72 GTCN PAM targeting sequence
  source 1..20: mol_type = other RNA
agggtttttaatcatgaatg

SEQ ID NO: 15625 - RNA, 20 nt, synthetic construct
  misc_feature 1..20: note = C9Orf72 GTCN PAM targeting sequence
  source 1..20: mol_type = other RNA
taggtggatcttattattct

SEQ ID NO: 15626 - RNA, 20 nt, synthetic construct
  misc_feature 1..20: note = C9Orf72 GTCN PAM targeting sequence
  source 1..20: mol_type = other RNA
tgttccagtactcaagagaa

SEQ ID NO: 15627 - RNA, 20 nt, synthetic construct
  misc_feature 1..20: note = C9Orf72 GTCN PAM targeting sequence
  source 1..20: mol_type = other RNA
tagtcagagcaactaggcaa

SEQ ID NO: 15628 - RNA, 20 nt, synthetic construct
  misc_feature 1..20: note = C9Orf72 GTCN PAM targeting sequence
  source 1..20: mol_type = other RNA
gagcaactaggcaagagaaa

SEQ ID NO: 15629 - RNA, 20 nt, synthetic construct
  misc_feature 1..20: note = C9Orf72 GTCN PAM targeting sequence
  source 1..20: mol_type = other RNA
aactgtctctctttgctgat

SEQ ID NO: 15630 - RNA, 20 nt, synthetic construct
  misc_feature 1..20: note = C9Orf72 GTCN PAM targeting sequence
  source 1..20: mol_type = other RNA
ctctttgctgatgatatgat

SEQ ID NO: 15631 - RNA, 20 nt, synthetic construct
  misc_feature 1..20: note = C9Orf72 GTCN PAM targeting sequence
  source 1..20: mol_type = other RNA
ttagggttttctatgtatga

SEQ ID NO: 15632 - RNA, 20 nt, synthetic construct
  misc_feature 1..20: note = C9Orf72 GTCN PAM targeting sequence
  source 1..20: mol_type = other RNA
cctagaactgataaataact

SEQ ID NO: 15633 - RNA, 20 nt, synthetic construct
  misc_feature 1..20: note = C9Orf72 GTCN PAM targeting sequence
  source 1..20: mol_type = other RNA
tcttgatttctttcagcagt

SEQ ID NO: 15634 - RNA, 20 nt, synthetic construct
  misc_feature 1..20: note = C9Orf72 GTCN PAM targeting sequence
  source 1..20: mol_type = other RNA
aaagcaagttaccactccaa

SEQ ID NO: 15635 - RNA, 20 nt, synthetic construct
  misc_feature 1..20: note = C9Orf72 GTCN PAM targeting sequence
  source 1..20: mol_type = other RNA
tttttcacagaatcagaaaa

SEQ ID NO: 15636 - RNA, 20 nt, synthetic construct
  misc_feature 1..20: note = C9Orf72 GTCN PAM targeting sequence
  source 1..20: mol_type = other RNA
ctggcttcgttctttttgct

SEQ ID NO: 15637 - RNA, 20 nt, synthetic construct
  misc_feature 1..20: note = C9Orf72 GTCN PAM targeting sequence
  source 1..20: mol_type = other RNA
gtttttgtaccagaaccatg

SEQ ID NO: 15638 - RNA, 20 nt, synthetic construct
  misc_feature 1..20: note = C9Orf72 GTCN PAM targeting sequence
  source 1..20: mol_type = other RNA
ctgtgtctgtttttgtacca

SEQ ID NO: 15639 - RNA, 20 nt, synthetic construct
  misc_feature 1..20: note = C9Orf72 GTCN PAM targeting sequence
  source 1..20: mol_type = other RNA
atttctgggttttctattct

SEQ ID NO: 15640 - RNA, 20 nt, synthetic construct
  misc_feature 1..20: note = C9Orf72 GTCN PAM targeting sequence
  source 1..20: mol_type = other RNA
taggtgtatgggtccatttc

SEQ ID NO: 15641 - RNA, 20 nt, synthetic construct
  misc_feature 1..20: note = C9Orf72 GTCN PAM targeting sequence
  source 1..20: mol_type = other RNA
attttgttgaatatcagatc

SEQ ID NO: 15642 - RNA, 20 nt, synthetic construct
  misc_feature 1..20: note = C9Orf72 GTCN PAM targeting sequence
  source 1..20: mol_type = other RNA
cacttgcctatttttagttt

SEQ ID NO: 15643 - RNA, 20 nt, synthetic construct
  misc_feature 1..20: note = C9Orf72 GTCN PAM targeting sequence
  source 1..20: mol_type = other RNA
gatgcatagtttgcaaatat

SEQ ID NO: 15644 - RNA, 20 nt, synthetic construct
  misc_feature 1..20: note = C9Orf72 GTCN PAM targeting sequence
  source 1..20: mol_type = other RNA
tttacacattttcaattaaa

SEQ ID NO: 15645 - RNA, 20 nt, synthetic construct
  misc_feature 1..20: note = C9Orf72 GTCN PAM targeting sequence
  source 1..20: mol_type = other RNA
gttcatgtcctttacacatt

SEQ ID NO: 15646 - RNA, 20 nt, synthetic construct
  misc_feature 1..20: note = C9Orf72 GTCN PAM targeting sequence
  source 1..20: mol_type = other RNA
tcaaaaggctattaaaaagc

SEQ ID NO: 15647 - RNA, 20 nt, synthetic construct
  misc_feature 1..20: note = C9Orf72 GTCN PAM targeting sequence
  source 1..20: mol_type = other RNA
ctttggaggcatgggatcca

SEQ ID NO: 15648 - RNA, 20 nt, synthetic construct
  misc_feature 1..20: note = C9Orf72 GTCN PAM targeting sequence
  source 1..20: mol_type = other RNA
gctgagcgcagcctgccagg

SEQ ID NO: 15649 - RNA, 20 nt, synthetic construct
  misc_feature 1..20: note = C9Orf72 GTCN PAM targeting sequence
  source 1..20: mol_type = other RNA
actgggcccactcatcctgg

SEQ ID NO: 15650 - RNA, 20 nt, synthetic construct
  misc_feature 1..20: note = C9Orf72 GTCN PAM targeting sequence
  source 1..20: mol_type = other RNA
agaaacctctgtggcggtgg

SEQ ID NO: 15651 - RNA, 20 nt, synthetic construct
  misc_feature 1..20: note = C9Orf72 GTCN PAM targeting sequence
  source 1..20: mol_type = other RNA
ggaggaaattgcctacttct

SEQ ID NO: 15652 - RNA, 20 nt, synthetic construct
  misc_feature 1..20: note = C9Orf72 GTCN PAM targeting sequence
  source 1..20: mol_type = other RNA
ttcacagttgtgtcttccaa

SEQ ID NO: 15653 - RNA, 20 nt, synthetic construct
  misc_feature 1..20: note = C9Orf72 GTCN PAM targeting sequence
  source 1..20: mol_type = other RNA
tccaaacagtgcaatttcat

SEQ ID NO: 15654 - RNA, 20 nt, synthetic construct
  misc_feature 1..20: note = C9Orf72 GTCN PAM targeting sequence
  source 1..20: mol_type = other RNA
taacacacaaatgaaattgc

SEQ ID NO: 15655 - RNA, 20 nt, synthetic construct
  misc_feature 1..20: note = C9Orf72 GTCN PAM targeting sequence
  source 1..20: mol_type = other RNA
ttctcaaaaaataacactaa

SEQ ID NO: 15656 - RNA, 20 nt, synthetic construct
  misc_feature 1..20: note = C9Orf72 GTCN PAM targeting sequence
  source 1..20: mol_type = other RNA
ttatctgttctttctgatta

SEQ ID NO: 15657 - RNA, 20 nt, synthetic construct
  misc_feature 1..20: note = C9Orf72 GTCN PAM targeting sequence
  source 1..20: mol_type = other RNA
atataatattaaaaccacta

SEQ ID NO: 15658 - RNA, 20 nt, synthetic construct
  misc_feature 1..20: note = C9Orf72 GTCN PAM targeting sequence
  source 1..20: mol_type = other RNA
acgagtaatataggaagtcc

SEQ ID NO: 15659 - RNA, 20 nt, synthetic construct
  misc_feature 1..20: note = C9Orf72 GTCN PAM targeting sequence
  source 1..20: mol_type = other RNA
tatatctgttgcatttattt

SEQ ID NO: 15660 - RNA, 20 nt, synthetic construct
  misc_feature 1..20: note = C9Orf72 GTCN PAM targeting sequence
  source 1..20: mol_type = other RNA
aaatatctggaaaccactcc

SEQ ID NO: 15661 - RNA, 20 nt, synthetic construct
  misc_feature 1..20: note = C9Orf72 GTCN PAM targeting sequence
  source 1..20: mol_type = other RNA
gaaagatgaatagcttactc

SEQ ID NO: 15662 - RNA, 20 nt, synthetic construct
  misc_feature 1..20: note = C9Orf72 GTCN PAM targeting sequence
  source 1..20: mol_type = other RNA
gtatgaagagtaacattatg

SEQ ID NO: 15663 - RNA, 20 nt, synthetic construct
  misc_feature 1..20: note = C9Orf72 GTCN PAM targeting sequence
  source 1..20: mol_type = other RNA
taatgttactcttcatactg

SEQ ID NO: 15664 - RNA, 20 nt, synthetic construct
  misc_feature 1..20: note = C9Orf72 GTCN PAM targeting sequence
  source 1..20: mol_type = other RNA
acacaatcacacaaatggaa

SEQ ID NO: 15665 - RNA, 20 nt, synthetic construct
  misc_feature 1..20: note = C9Orf72 GTCN PAM targeting sequence
  source 1..20: mol_type = other RNA
ttctctcttgatagtaaggt

SEQ ID NO: 15666 - RNA, 20 nt, synthetic construct
  misc_feature 1..20: note = C9Orf72 GTCN PAM targeting sequence
  source 1..20: mol_type = other RNA
ccttactatcaagagagaag

SEQ ID NO: 15667 - RNA, 20 nt, synthetic construct
  misc_feature 1..20: note = C9Orf72 GTCN PAM targeting sequence
  source 1..20: mol_type = other RNA
caaaggctaaagtcacctta

SEQ ID NO: 15668 - RNA, 20 nt, synthetic construct
  misc_feature 1..20: note = C9Orf72 GTCN PAM targeting sequence
  source 1..20: mol_type = other RNA
cttgttcatatgcaattttt

SEQ ID NO: 15669 - RNA, 20 nt, synthetic construct
  misc_feature 1..20: note = C9Orf72 GTCN PAM targeting sequence
  source 1..20: mol_type = other RNA
tttctttttttaactactaa

SEQ ID NO: 15670 - RNA, 20 nt, synthetic construct
  misc_feature 1..20: note = C9Orf72 GTCN PAM targeting sequence
  source 1..20: mol_type = other RNA
acaatatgtagaaaggctta

SEQ ID NO: 15671 - RNA, 20 nt, synthetic construct
  misc_feature 1..20: note = C9Orf72 GTCN PAM targeting sequence
  source 1..20: mol_type = other RNA
ctcataatttttgaaatatg

SEQ ID NO: 15672 - RNA, 20 nt, synthetic construct
  misc_feature 1..20: note = C9Orf72 GTCN PAM targeting sequence
  source 1..20: mol_type = other RNA
tttagaaatttacattgatg

SEQ ID NO: 15673 - RNA, 20 nt, synthetic construct
  misc_feature 1..20: note = C9Orf72 GTCN PAM targeting sequence
  source 1..20: mol_type = other RNA
tttgaacactatttgtacaa

SEQ ID NO: 15674 - RNA, 20 nt, synthetic construct
  misc_feature 1..20: note = C9Orf72 GTCN PAM targeting sequence
  source 1..20: mol_type = other RNA
ggaaaaggcaactggctcct

SEQ ID NO: 15675 - RNA, 20 nt, synthetic construct
  misc_feature 1..20: note = C9Orf72 GTCN PAM targeting sequence
  source 1..20: mol_type = other RNA
ttattaaaagcacagatcct

SEQ ID NO: 15676 - RNA, 20 nt, synthetic construct
  misc_feature 1..20: note = C9Orf72 GTCN PAM targeting sequence
  source 1..20: mol_type = other RNA
ggatctgtgcttttaataat

SEQ ID NO: 15677 - RNA, 20 nt, synthetic construct
  misc_feature 1..20: note = C9Orf72 GTCN PAM targeting sequence
  source 1..20: mol_type = other RNA
agcacttcattcccttaagg

SEQ ID NO: 15678 - RNA, 20 nt, synthetic construct
  misc_feature 1..20: note = C9Orf72 GTCN PAM targeting sequence
  source 1..20: mol_type = other RNA
gtaaatgccacttatttcaa

SEQ ID NO: 15679 - RNA, 20 nt, synthetic construct
  misc_feature 1..20: note = C9Orf72 GTCN PAM targeting sequence
  source 1..20: mol_type = other RNA
tttggtatatttgtaaaaat

SEQ ID NO: 15680 - RNA, 20 nt, synthetic construct
  misc_feature 1..20: note = C9Orf72 GTCN PAM targeting sequence
  source 1..20: mol_type = other RNA
ggtatatttttacaaatata

SEQ ID NO: 15681 - RNA, 20 nt, synthetic construct
  misc_feature 1..20: note = C9Orf72 GTCN PAM targeting sequence
  source 1..20: mol_type = other RNA
tctgattccaaattccaaat

SEQ ID NO: 15682 - RNA, 20 nt, synthetic construct
  misc_feature 1..20: note = C9Orf72 GTCN PAM targeting sequence
  source 1..20: mol_type = other RNA
tctcagctctgctacttctg

SEQ ID NO: 15683 - RNA, 20 nt, synthetic construct
  misc_feature 1..20: note = C9Orf72 GTCN PAM targeting sequence
  source 1..20: mol_type = other RNA
agtgattttcccagaaccag

SEQ ID NO: 15684 - RNA, 20 nt, synthetic construct
  misc_feature 1..20: note = C9Orf72 GTCN PAM targeting sequence
  source 1..20: mol_type = other RNA
cagtctcttcataaaaaaaa

SEQ ID NO: 15685 - RNA, 20 nt, synthetic construct
  misc_feature 1..20: note = C9Orf72 GTCN PAM targeting sequence
  source 1..20: mol_type = other RNA
cttcataaaaaaaaaaaaaa

SEQ ID NO: 15686 - RNA, 20 nt, synthetic construct
  misc_feature 1..20: note = C9Orf72 GTCN PAM targeting sequence
  source 1..20: mol_type = other RNA
cttttttttttttttttttt

SEQ ID NO: 15687 - RNA, 20 nt, synthetic construct
  misc_feature 1..20: note = C9Orf72 GTCN PAM targeting sequence
  source 1..20: mol_type = other RNA
tctttctttctcaaaatgac

SEQ ID NO: 15688 - RNA, 20 nt, synthetic construct
  misc_feature 1..20: note = C9Orf72 GTCN PAM targeting sequence
  source 1..20: mol_type = other RNA
ttttgagaaagaaagaagac

SEQ ID NO: 15689 - RNA, 20 nt, synthetic construct
  misc_feature 1..20: note = C9Orf72 GTCN PAM targeting sequence
  source 1..20: mol_type = other RNA
aagcagttatgacaaatggg

SEQ ID NO: 15690 - RNA, 20 nt, synthetic construct
  misc_feature 1..20: note = C9Orf72 GTCN PAM targeting sequence
  source 1..20: mol_type = other RNA
taactgcttggactttaagc

SEQ ID NO: 15691 - RNA, 20 nt, synthetic construct
  misc_feature 1..20: note = C9Orf72 GTCN PAM targeting sequence
  source 1..20: mol_type = other RNA
aggaaccactaggaataaat

SEQ ID NO: 15692 - RNA, 20 nt, synthetic construct
  misc_feature 1..20: note = C9Orf72 GTCN PAM targeting sequence
  source 1..20: mol_type = other RNA
ccactttctcactcctccaa

SEQ ID NO: 15693 - RNA, 20 nt, synthetic construct
  misc_feature 1..20: note = C9Orf72 GTCN PAM targeting sequence
  source 1..20: mol_type = other RNA
aaggaattctttagagagag

SEQ ID NO: 15694 - RNA, 20 nt, synthetic construct
  misc_feature 1..20: note = C9Orf72 GTCN PAM targeting sequence
  source 1..20: mol_type = other RNA
cagaggtttagcaagtactc

SEQ ID NO: 15695 - RNA, 20 nt, synthetic construct
  misc_feature 1..20: note = C9Orf72 GTCN PAM targeting sequence
  source 1..20: mol_type = other RNA
tcctagcagcttgcttaatg

SEQ ID NO: 15696 - RNA, 20 nt, synthetic construct
  misc_feature 1..20: note = C9Orf72 GTCN PAM targeting sequence
  source 1..20: mol_type = other RNA
ctattggtagcagtttccac

SEQ ID NO: 15697 - RNA, 20 nt, synthetic construct
  misc_feature 1..20: note = C9Orf72 GTCN PAM targeting sequence
  source 1..20: mol_type = other RNA
taaatagttttttatggccc

SEQ ID NO: 15698 - RNA, 20 nt, synthetic construct
  misc_feature 1..20: note = C9Orf72 GTCN PAM targeting sequence
  source 1..20: mol_type = other RNA
tagtaggaaaagaatactgt

SEQ ID NO: 15699 - RNA, 20 nt, synthetic construct
  misc_feature 1..20: note = C9Orf72 GTCN PAM targeting sequence
  source 1..20: mol_type = other RNA
agtttccttctacagtattc

SEQ ID NO: 15700 - RNA, 20 nt, synthetic construct
  misc_feature 1..20: note = C9Orf72 GTCN PAM targeting sequence
  source 1..20: mol_type = other RNA
gctttcagaatctgtgggca

SEQ ID NO: 15701 - RNA, 20 nt, synthetic construct
  misc_feature 1..20: note = C9Orf72 GTCN PAM targeting sequence
  source 1..20: mol_type = other RNA
attactgtttaatatgatag

SEQ ID NO: 15702 - RNA, 20 nt, synthetic construct
  misc_feature 1..20: note = C9Orf72 GTCN PAM targeting sequence
  source 1..20: mol_type = other RNA
taagagcaataataagcatc

SEQ ID NO: 15703 - RNA, 20 nt, synthetic construct
  misc_feature 1..20: note = C9Orf72 GTCN PAM targeting sequence
  source 1..20: mol_type = other RNA
ctcaggatacagatatagtg

SEQ ID NO: 15704 - RNA, 20 nt, synthetic construct
  misc_feature 1..20: note = C9Orf72 GTCN PAM targeting sequence
  source 1..20: mol_type = other RNA
aggaaaaggtgctttgtgaa

SEQ ID NO: 15705 - RNA, 20 nt, synthetic construct
  misc_feature 1..20: note = C9Orf72 GTCN PAM targeting sequence
  source 1..20: mol_type = other RNA
ctcgtagtgcttcacaaagc

SEQ ID NO: 15706 - RNA, 20 nt, synthetic construct
  misc_feature 1..20: note = C9Orf72 GTCN PAM targeting sequence
  source 1..20: mol_type = other RNA
taaagtaagtgattatttct

SEQ ID NO: 15707 - RNA, 20 nt, synthetic construct
  misc_feature 1..20: note = C9Orf72 GTCN PAM targeting sequence
  source 1..20: mol_type = other RNA
tgctcacccagatatttgtg

SEQ ID NO: 15708 - RNA, 20 nt, synthetic construct
  misc_feature 1..20: note = C9Orf72 GTCN PAM targeting sequence
  source 1..20: mol_type = other RNA
caaatatctgggtgagcaag

SEQ ID NO: 15709 - RNA, 20 nt, synthetic construct
  misc_feature 1..20: note = C9Orf72 GTCN PAM targeting sequence
  source 1..20: mol_type = other RNA
agaatatgattgtcacaaat

SEQ ID NO: 15710 - RNA, 20 nt, synthetic construct
  misc_feature 1..20: note = C9Orf72 GTCN PAM targeting sequence
  source 1..20: mol_type = other RNA
tcctgtagctcaccctttat

SEQ ID NO: 15711 - RNA, 20 nt, synthetic construct
  misc_feature 1..20: note = C9Orf72 GTCN PAM targeting sequence
  source 1..20: mol_type = other RNA
aggaaagaggatgctttttc

SEQ ID NO: 15712 - RNA, 20 nt, synthetic construct
  misc_feature 1..20: note = C9Orf72 GTCN PAM targeting sequence
  source 1..20: mol_type = other RNA
tcaagacccattcaaggtcc

SEQ ID NO: 15713 - RNA, 20 nt, synthetic construct
  misc_feature 1..20: note = C9Orf72 GTCN PAM targeting sequence
  source 1..20: mol_type = other RNA
tgatgacttggagaggcaga

SEQ ID NO: 15714 - RNA, 20 nt, synthetic construct
  misc_feature 1..20: note = C9Orf72 GTCN PAM targeting sequence
  source 1..20: mol_type = other RNA
atttcttccagggatccgga

SEQ ID NO: 15715 - RNA, 20 nt, synthetic construct
  misc_feature 1..20: note = C9Orf72 GTCN PAM targeting sequence
  source 1..20: mol_type = other RNA
attctctaccaagctttcct

SEQ ID NO: 15716 - RNA, 20 nt, synthetic construct
  misc_feature 1..20: note = C9Orf72 GTCN PAM targeting sequence
  source 1..20: mol_type = other RNA
tagaaatctggattatattt

SEQ ID NO: 15717 - RNA, 20 nt, synthetic construct
  misc_feature 1..20: note = C9Orf72 GTCN PAM targeting sequence
  source 1..20: mol_type = other RNA
gtttggacaagccacattgc

SEQ ID NO: 15718 - RNA, 20 nt, synthetic construct
  misc_feature 1..20: note = C9Orf72 GTCN PAM targeting sequence
  source 1..20: mol_type = other RNA
aaactgacatgtgctttaag

SEQ ID NO: 15719 - RNA, 20 nt, synthetic construct
  misc_feature 1..20: note = C9Orf72 GTCN PAM targeting sequence
  source 1..20: mol_type = other RNA
agtgtggctagagcttacta

SEQ ID NO: 15720 - RNA, 20 nt, synthetic construct
  misc_feature 1..20: note = C9Orf72 GTCN PAM targeting sequence
  source 1..20: mol_type = other RNA
gggttcagagcctgtgccac

SEQ ID NO: 15721 - RNA, 20 nt, synthetic construct
  misc_feature 1..20: note = C9Orf72 GTCN PAM targeting sequence
  source 1..20: mol_type = other RNA
ggtagaaagctatgaaataa

SEQ ID NO: 15722 - RNA, 20 nt, synthetic construct
  misc_feature 1..20: note = C9Orf72 GTCN PAM targeting sequence
  source 1..20: mol_type = other RNA
tcacattttattcctgtgtg

SEQ ID NO: 15723 - RNA, 20 nt, synthetic construct
  misc_feature 1..20: note = C9Orf72 GTCN PAM targeting sequence
  source 1..20: mol_type = other RNA
cagataaaattaatattacc

SEQ ID NO: 15724 - RNA, 20 nt, synthetic construct
  misc_feature 1..20: note = C9Orf72 GTCN PAM targeting sequence
  source 1..20: mol_type = other RNA
gaacgatgagtattctgtga

SEQ ID NO: 15725 - RNA, 20 nt, synthetic construct
  misc_feature 1..20: note = C9Orf72 GTCN PAM targeting sequence
  source 1..20: mol_type = other RNA
cctggtcacagaatccaacc

SEQ ID NO: 15726 - RNA, 20 nt, synthetic construct
  misc_feature 1..20: note = C9Orf72 GTCN PAM targeting sequence
  source 1..20: mol_type = other RNA
cagaatccaaccatgaagca

SEQ ID NO: 15727 - RNA, 20 nt, synthetic construct
  misc_feature 1..20: note = C9Orf72 GTCN PAM targeting sequence
  source 1..20: mol_type = other RNA
ttgccattgtaatcaaattg

SEQ ID NO: 15728 - RNA, 20 nt, synthetic construct
  misc_feature 1..20: note = C9Orf72 GTCN PAM targeting sequence
  source 1..20: mol_type = other RNA
aagttacaaatgttatctcc

SEQ ID NO: 15729 - RNA, 20 nt, synthetic construct
  misc_feature 1..20: note = C9Orf72 GTCN PAM targeting sequence
  source 1..20: mol_type = other RNA
attggttcttattaaataaa

SEQ ID NO: 15730 - RNA, 20 nt, synthetic construct
  misc_feature 1..20: note = C9Orf72 GTCN PAM targeting sequence
  source 1..20: mol_type = other RNA
tgtttctgtttcttatcagt

SEQ ID NO: 15731 - RNA, 20 nt, synthetic construct
  misc_feature 1..20: note = C9Orf72 GTCN PAM targeting sequence
  source 1..20: mol_type = other RNA
aaattccactagcatgtgaa

SEQ ID NO: 15732 - RNA, 20 nt, synthetic construct
  misc_feature 1..20: note = C9Orf72 GTCN PAM targeting sequence
  source 1..20: mol_type = other RNA
gcaagaacatgttgaggcct

SEQ ID NO: 15733 - RNA, 20 nt, synthetic construct
  misc_feature 1..20: note = C9Orf72 GTCN PAM targeting sequence
  source 1..20: mol_type = other RNA
caatacgtatttgtcacttg

SEQ ID NO: 15734 - RNA, 20 nt, synthetic construct
  misc_feature 1..20: note = C9Orf72 GTCN PAM targeting sequence
  source 1..20: mol_type = other RNA
cttgttagctgacgcctggc

SEQ ID NO: 15735 - RNA, 20 nt, synthetic construct
  misc_feature 1..20: note = C9Orf72 GTCN PAM targeting sequence
  source 1..20: mol_type = other RNA
gcaaactgtatacactttgc

SEQ ID NO: 15736 - RNA, 20 nt, synthetic construct
  misc_feature 1..20: note = C9Orf72 GTCN PAM targeting sequence
  source 1..20: mol_type = other RNA
gctgtcacagatagttcgag

SEQ ID NO: 15737 - RNA, 20 nt, synthetic construct
  misc_feature 1..20: note = C9Orf72 GTCN PAM targeting sequence
  source 1..20: mol_type = other RNA
cagatagttcgagaaatact

SEQ ID NO: 15738 - RNA, 20 nt, synthetic construct
  misc_feature 1..20: note = C9Orf72 GTCN PAM targeting sequence
  source 1..20: mol_type = other RNA
ttgttgtcgaaagatatagc

SEQ ID NO: 15739 - RNA, 20 nt, synthetic construct
  misc_feature 1..20: note = C9Orf72 GTCN PAM targeting sequence
  source 1..20: mol_type = other RNA
aaagatatagcctttatttt

SEQ ID NO: 15740 - RNA, 20 nt, synthetic construct
  misc_feature 1..20: note = C9Orf72 GTCN PAM targeting sequence
  source 1..20: mol_type = other RNA
agtggttctcagatttgcct

SEQ ID NO: 15741 - RNA, 20 nt, synthetic construct
  misc_feature 1..20: note = C9Orf72 GTCN PAM targeting sequence
  source 1..20: mol_type = other RNA
ttaacaaggcttcccaagtt

SEQ ID NO: 15742 - RNA, 20 nt, synthetic construct
  misc_feature 1..20: note = C9Orf72 GTCN PAM targeting sequence
  source 1..20: mol_type = other RNA
tgtgcatattttcctgtgcg

SEQ ID NO: 15743 - RNA, 20 nt, synthetic construct
  misc_feature 1..20: note = C9Orf72 GTCN PAM targeting sequence
  source 1..20: mol_type = other RNA
cctttcatctaattgaggtg

SEQ ID NO: 15744 - RNA, 20 nt, synthetic construct
  misc_feature 1..20: note = C9Orf72 GTCN PAM targeting sequence
  source 1..20: mol_type = other RNA
tttctttgtcccctttcatc

SEQ ID NO: 15745 - RNA, 20 nt, synthetic construct
  misc_feature 1..20: note = C9Orf72 GTCN PAM targeting sequence
  source 1..20: mol_type = other RNA
ctcgggaagaggtcatttct

SEQ ID NO: 15746 - RNA, 20 nt, synthetic construct
  misc_feature 1..20: note = C9Orf72 GTCN PAM targeting sequence
  source 1..20: mol_type = other RNA
acctcgtactatctttgata

SEQ ID NO: 15747 - RNA, 20 nt, synthetic construct
  misc_feature 1..20: note = C9Orf72 GTCN PAM targeting sequence
  source 1..20: mol_type = other RNA
atcaaagatagtacgaggta

SEQ ID NO: 15748 - RNA, 20 nt, synthetic construct
  misc_feature 1..20: note = C9Orf72 GTCN PAM targeting sequence
  source 1..20: mol_type = other RNA
gattttagagagttagaaac

SEQ ID NO: 15749 - RNA, 20 nt, synthetic construct
  misc_feature 1..20: note = C9Orf72 GTCN PAM targeting sequence
  source 1..20: mol_type = other RNA
aaaatagtattctcaaatct

SEQ ID NO: 15750 - RNA, 20 nt, synthetic construct
  misc_feature 1..20: note = C9Orf72 GTCN PAM targeting sequence
  source 1..20: mol_type = other RNA
cttcgggagatgaatcatcc

SEQ ID NO: 15751 - RNA, 20 nt, synthetic construct
  misc_feature 1..20: note = C9Orf72 GTCN PAM targeting sequence
  source 1..20: mol_type = other RNA
tagagcatggtgccctggaa

SEQ ID NO: 15752 - RNA, 20 nt, synthetic construct
  misc_feature 1..20: note = C9Orf72 GTCN PAM targeting sequence
  source 1..20: mol_type = other RNA
aatatttacaccgaattcca

SEQ ID NO: 15753 - RNA, 20 nt, synthetic construct
  misc_feature 1..20: note = C9Orf72 GTCN PAM targeting sequence
  source 1..20: mol_type = other RNA
tttacttttggaccccaaat

SEQ ID NO: 15754 - RNA, 20 nt, synthetic construct
  misc_feature 1..20: note = C9Orf72 GTCN PAM targeting sequence
  source 1..20: mol_type = other RNA
aaaagtaaatgacaactccc

SEQ ID NO: 15755 - RNA, 20 nt, synthetic construct
  misc_feature 1..20: note = C9Orf72 GTCN PAM targeting sequence
  source 1..20: mol_type = other RNA
agtagggcagcccctcccaa

SEQ ID NO: 15756 - RNA, 20 nt, synthetic construct
  misc_feature 1..20: note = C9Orf72 GTCN PAM targeting sequence
  source 1..20: mol_type = other RNA
aaaattgttcactgaaccat

SEQ ID NO: 15757 - RNA, 20 nt, synthetic construct
  misc_feature 1..20: note = C9Orf72 GTCN PAM targeting sequence
  source 1..20: mol_type = other RNA
acaaccacagttaatacagt

SEQ ID NO: 15758 - RNA, 20 nt, synthetic construct
  misc_feature 1..20: note = C9Orf72 GTCN PAM targeting sequence
  source 1..20: mol_type = other RNA
ttatgccaagaactgtatta

SEQ ID NO: 15759 - RNA, 20 nt, synthetic construct
  misc_feature 1..20: note = C9Orf72 GTCN PAM targeting sequence
  source 1..20: mol_type = other RNA
aaattacttttgaagagagc

SEQ ID NO: 15760 - RNA, 20 nt, synthetic construct
  misc_feature 1..20: note = C9Orf72 GTCN PAM targeting sequence
  source 1..20: mol_type = other RNA
ggtttcttgctgtggttctg

SEQ ID NO: 15761 - RNA, 20 nt, synthetic construct
  misc_feature 1..20: note = C9Orf72 GTCN PAM targeting sequence
  source 1..20: mol_type = other RNA
atccagcgaggcgtttcctc

SEQ ID NO: 15762 - RNA, 20 nt, synthetic construct
  misc_feature 1..20: note = C9Orf72 GTCN PAM targeting sequence
  source 1..20: mol_type = other RNA
tcttctcatgaacaggctcc

SEQ ID NO: 15763 - RNA, 20 nt, synthetic construct
  misc_feature 1..20: note = C9Orf72 GTCN PAM targeting sequence
  source 1..20: mol_type = other RNA
attgtttccgggggatacaa

SEQ ID NO: 15764 - RNA, 20 nt, synthetic construct
  misc_feature 1..20: note = C9Orf72 GTCN PAM targeting sequence
  source 1..20: mol_type = other RNA
tctttggtatcatttctgct

SEQ ID NO: 15765 - RNA, 20 nt, synthetic construct
  misc_feature 1..20: note = C9Orf72 GTCN PAM targeting sequence
  source 1..20: mol_type = other RNA
atgctttcagaaatggaatc

SEQ ID NO: 15766 - RNA, 20 nt, synthetic construct
  misc_feature 1..20: note = C9Orf72 GTCN PAM targeting sequence
  source 1..20: mol_type = other RNA
tattaaaccttctgagttct

SEQ ID NO: 15767 - RNA, 20 nt, synthetic construct
  misc_feature 1..20: note = C9Orf72 GTCN PAM targeting sequence
  source 1..20: mol_type = other RNA
agacagtgtgccagaattag

SEQ ID NO: 15768 - RNA, 20 nt, synthetic construct
  misc_feature 1..20: note = C9Orf72 GTCN PAM targeting sequence
  source 1..20: mol_type = other RNA
ggaccagcagaactcagaag

SEQ ID NO: 15769 - RNA, 20 nt, synthetic construct
  misc_feature 1..20: note = C9Orf72 GTCN PAM targeting sequence
  source 1..20: mol_type = other RNA
tgcctttgtggaggaagagc

SEQ ID NO: 15770 - RNA, 20 nt, synthetic construct
  misc_feature 1..20: note = C9Orf72 GTCN PAM targeting sequence
  source 1..20: mol_type = other RNA
tggtggaagaaacatcatcc

SEQ ID NO: 15771 - RNA, 20 nt, synthetic construct
  misc_feature 1..20: note = C9Orf72 GTCN PAM targeting sequence
  source 1..20: mol_type = other RNA
tgttcccatggaggtgacag

SEQ ID NO: 15772 - RNA, 20 nt, synthetic construct
  misc_feature 1..20: note = C9Orf72 GTCN PAM targeting sequence
  source 1..20: mol_type = other RNA
cctccatgggaacaggaccg

SEQ ID NO: 15773 - RNA, 20 nt, synthetic construct
  misc_feature 1..20: note = C9Orf72 GTCN PAM targeting sequence
  source 1..20: mol_type = other RNA
ctgtcacctccatgggaaca

SEQ ID NO: 15774 - RNA, 20 nt, synthetic construct
  misc_feature 1..20: note = C9Orf72 GTCN PAM targeting sequence
  source 1..20: mol_type = other RNA
gagaagccctgtgaggattg

SEQ ID NO: 15775 - RNA, 20 nt, synthetic construct
  misc_feature 1..20: note = C9Orf72 GTCN PAM targeting sequence
  source 1..20: mol_type = other RNA
catcttgattctcctctttc

SEQ ID NO: 15776 - RNA, 20 nt, synthetic construct
  misc_feature 1..20: note = C9Orf72 GTCN PAM targeting sequence
  source 1..20: mol_type = other RNA
agaggattccctggacctct

SEQ ID NO: 15777 - RNA, 20 nt, synthetic construct
  misc_feature 1..20: note = C9Orf72 GTCN PAM targeting sequence
  source 1..20: mol_type = other RNA
agggaatcctctggaccatc

SEQ ID NO: 15778 - RNA, 20 nt, synthetic construct
  misc_feature 1..20: note = C9Orf72 GTCN PAM targeting sequence
  source 1..20: mol_type = other RNA
cagtgggccctcagagaaaa

SEQ ID NO: 15779 - RNA, 20 nt, synthetic construct
  misc_feature 1..20: note = C9Orf72 GTCN PAM targeting sequence
  source 1..20: mol_type = other RNA
gccttcatcctaaacaagag

SEQ ID NO: 15780 - RNA, 20 nt, synthetic construct
  misc_feature 1..20: note = C9Orf72 GTCN PAM targeting sequence
  source 1..20: mol_type = other RNA
ctcaccactgggtcggcctt

SEQ ID NO: 15781 - RNA, 20 nt, synthetic construct
  misc_feature 1..20: note = C9Orf72 GTCN PAM targeting sequence
  source 1..20: mol_type = other RNA
gttgtgagcactttctttcc

SEQ ID NO: 15782 - RNA, 20 nt, synthetic construct
  misc_feature 1..20: note = C9Orf72 GTCN PAM targeting sequence
  source 1..20: mol_type = other RNA
aagctgccaaccaattatta

SEQ ID NO: 15783 - RNA, 20 nt, synthetic construct
  misc_feature 1..20: note = C9Orf72 GTCN PAM targeting sequence
  source 1..20: mol_type = other RNA
ccaactcttcagtggcacgg

SEQ ID NO: 15784 - RNA, 20 nt, synthetic construct
  misc_feature 1..20: note = C9Orf72 GTCN PAM targeting sequence
  source 1..20: mol_type = other RNA
gaaaacacacattttgaaag

SEQ ID NO: 15785 - RNA, 20 nt, synthetic construct
  misc_feature 1..20: note = C9Orf72 GTCN PAM targeting sequence
  source 1..20: mol_type = other RNA
gaagatttttaatatgctct

SEQ ID NO: 15786 - RNA, 20 nt, synthetic construct
  misc_feature 1..20: note = C9Orf72 GTCN PAM targeting sequence
  source 1..20: mol_type = other RNA
gttatctgaagttgataaag

SEQ ID NO: 15787 - RNA, 20 nt, synthetic construct
  misc_feature 1..20: note = C9Orf72 GTCN PAM targeting sequence
  source 1..20: mol_type = other RNA
tctccaagcatagcagcctg

SEQ ID NO: 15788 - RNA, 20 nt, synthetic construct
  misc_feature 1..20: note = C9Orf72 GTCN PAM targeting sequence
  source 1..20: mol_type = other RNA
tgatgtgattttctttatca

SEQ ID NO: 15789 - RNA, 20 nt, synthetic construct
  misc_feature 1..20: note = C9Orf72 GTCN PAM targeting sequence
  source 1..20: mol_type = other RNA
tcaaatgttattttctgttt

SEQ ID NO: 15790 - RNA, 20 nt, synthetic construct
  misc_feature 1..20: note = C9Orf72 GTCN PAM targeting sequence
  source 1..20: mol_type = other RNA
ctcgttttcctggagttgag

SEQ ID NO: 15791 - RNA, 20 nt, synthetic construct
  misc_feature 1..20: note = C9Orf72 GTCN PAM targeting sequence
  source 1..20: mol_type = other RNA
ttcttcattcatttgaaata

SEQ ID NO: 15792 - RNA, 20 nt, synthetic construct
  misc_feature 1..20: note = C9Orf72 GTCN PAM targeting sequence
  source 1..20: mol_type = other RNA
agttcattttggcttcagct

SEQ ID NO: 15793 - RNA, 20 nt, synthetic construct
  misc_feature 1..20: note = C9Orf72 GTCN PAM targeting sequence
  source 1..20: mol_type = other RNA
tttgagggattttgactcat

SEQ ID NO: 15794 - RNA, 20 nt, synthetic construct
  misc_feature 1..20: note = C9Orf72 GTCN PAM targeting sequence
  source 1..20: mol_type = other RNA
aaatccctcaaatgacaagt

SEQ ID NO: 15795 - RNA, 20 nt, synthetic construct
  misc_feature 1..20: note = C9Orf72 GTCN PAM targeting sequence
  source 1..20: mol_type = other RNA
ctagaagatgagtcaaaatc

SEQ ID NO: 15796 - RNA, 20 nt, synthetic construct
  misc_feature 1..20: note = C9Orf72 GTCN PAM targeting sequence
  source 1..20: mol_type = other RNA
agaaaaagagttaaaataag

SEQ ID NO: 15797 - RNA, 20 nt, synthetic construct
  misc_feature 1..20: note = C9Orf72 GTCN PAM targeting sequence
  source 1..20: mol_type = other RNA
agaaagcattacagcaagct

SEQ ID NO: 15798 - RNA, 20 nt, synthetic construct
  misc_feature 1..20: note = C9Orf72 GTCN PAM targeting sequence
  source 1..20: mol_type = other RNA
gctttatgtgggaagagaaa

SEQ ID NO: 15799 - RNA, 20 nt, synthetic construct
  misc_feature 1..20: note = C9Orf72 GTCN PAM targeting sequence
  source 1..20: mol_type = other RNA
ggtctcacactttcaggcag

SEQ ID NO: 15800 - RNA, 20 nt, synthetic construct
  misc_feature 1..20: note = C9Orf72 GTCN PAM targeting sequence
  source 1..20: mol_type = other RNA
cacactttcaggcagtgctg

SEQ ID NO: 15801 - RNA, 20 nt, synthetic construct
  misc_feature 1..20: note = C9Orf72 GTCN PAM targeting sequence
  source 1..20: mol_type = other RNA
tgggggagctaagcagggtt

SEQ ID NO: 15802 - RNA, 20 nt, synthetic construct
  misc_feature 1..20: note = C9Orf72 GTCN PAM targeting sequence
  source 1..20: mol_type = other RNA
ggaacccgaatccgcacgtg

SEQ ID NO: 15803 - RNA, 20 nt, synthetic construct
  misc_feature 1..20: note = C9Orf72 GTCN PAM targeting sequence
  source 1..20: mol_type = other RNA
gctccgtttgccacgtgcgg

SEQ ID NO: 15804 - RNA, 20 nt, synthetic construct
  misc_feature 1..20: note = C9Orf72 GTCN PAM targeting sequence
  source 1..20: mol_type = other RNA
attcagggattcaacttctt

SEQ ID NO: 15805 - RNA, 20 nt, synthetic construct
  misc_feature 1..20: note = C9Orf72 GTCN PAM targeting sequence
  source 1..20: mol_type = other RNA
aaaccaggaagaagttgaat

SEQ ID NO: 15806 - RNA, 20 nt, synthetic construct
  misc_feature 1..20: note = C9Orf72 GTCN PAM targeting sequence
  source 1..20: mol_type = other RNA
aggaatttatccatttcttc

SEQ ID NO: 15807 - RNA, 20 nt, synthetic construct
  misc_feature 1..20: note = C9Orf72 GTCN PAM targeting sequence
  source 1..20: mol_type = other RNA
cccattattattgtgtggga

SEQ ID NO: 15808 - RNA, 20 nt, synthetic construct
  misc_feature 1..20: note = C9Orf72 GTCN PAM targeting sequence
  source 1..20: mol_type = other RNA
aagtctctttgtaggtctct

SEQ ID NO: 15809 - RNA, 20 nt, synthetic construct
  misc_feature 1..20: note = C9Orf72 GTCN PAM targeting sequence
  source 1..20: mol_type = other RNA
ctttgtaggtctctaagaac

SEQ ID NO: 15810 - RNA, 20 nt, synthetic construct
  misc_feature 1..20: note = C9Orf72 GTCN PAM targeting sequence
  source 1..20: mol_type = other RNA
ctaagaacttgctttatgaa

SEQ ID NO: 15811 - RNA, 20 nt, synthetic construct
  misc_feature 1..20: note = C9Orf72 GTCN PAM targeting sequence
  source 1..20: mol_type = other RNA
tttcatgtgagatgggtctc

SEQ ID NO: 15812 - RNA, 20 nt, synthetic construct
  misc_feature 1..20: note = C9Orf72 GTCN PAM targeting sequence
  source 1..20: mol_type = other RNA
cctgaatatagcacactgat

SEQ ID NO: 15813 - RNA, 20 nt, synthetic construct
  misc_feature 1..20: note = C9Orf72 GTCN PAM targeting sequence
  source 1..20: mol_type = other RNA
ttactctttatacaggtggc

SEQ ID NO: 15814 - RNA, 20 nt, synthetic construct
  misc_feature 1..20: note = C9Orf72 GTCN PAM targeting sequence
  source 1..20: mol_type = other RNA
gtgtcttttaactggggcat

SEQ ID NO: 15815 - RNA, 20 nt, synthetic construct
  misc_feature 1..20: note = C9Orf72 GTCN PAM targeting sequence
  source 1..20: mol_type = other RNA
tttaactggggcatttagcc

SEQ ID NO: 15816 - RNA, 20 nt, synthetic construct
  misc_feature 1..20: note = C9Orf72 GTCN PAM targeting sequence
  source 1..20: mol_type = other RNA
gggtgacagagggagaccct

SEQ ID NO: 15817 - RNA, 20 nt, synthetic construct
  misc_feature 1..20: note = C9Orf72 GTCN PAM targeting sequence
  source 1..20: mol_type = other RNA
agctattcaggaagctgagg

SEQ ID NO: 15818 - RNA, 20 nt, synthetic construct
  misc_feature 1..20: note = C9Orf72 GTCN PAM targeting sequence
  source 1..20: mol_type = other RNA
ctacaaaatataaaaataca

SEQ ID NO: 15819 - RNA, 20 nt, synthetic construct
  misc_feature 1..20: note = C9Orf72 GTCN PAM targeting sequence
  source 1..20: mol_type = other RNA
ccttgcattgcccaggctgg

SEQ ID NO: 15820 - RNA, 20 nt, synthetic construct
  misc_feature 1..20: note = C9Orf72 GTCN PAM targeting sequence
  source 1..20: mol_type = other RNA
cgagctcctgggctcacgtg

SEQ ID NO: 15821 - RNA, 20 nt, synthetic construct
  misc_feature 1..20: note = C9Orf72 GTCN PAM targeting sequence
  source 1..20: mol_type = other RNA
tctgattgcttccctctgct

SEQ ID NO: 15822 - RNA, 20 nt, synthetic construct
  misc_feature 1..20: note = C9Orf72 GTCN PAM targeting sequence
  source 1..20: mol_type = other RNA
atatttcaagcttcactgaa

SEQ ID NO: 15823 - RNA, 20 nt, synthetic construct
  misc_feature 1..20: note = C9Orf72 GTCN PAM targeting sequence
  source 1..20: mol_type = other RNA
ctccacaggcccttgtctat

SEQ ID NO: 15824 - RNA, 20 nt, synthetic construct
  misc_feature 1..20: note = C9Orf72 GTCN PAM targeting sequence
  source 1..20: mol_type = other RNA
atacaaggtcacagtttcat

SEQ ID NO: 15825 - RNA, 20 nt, synthetic construct
  misc_feature 1..20: note = C9Orf72 GTCN PAM targeting sequence
  source 1..20: mol_type = other RNA
cagtttcattgagggctttt

SEQ ID NO: 15826 - RNA, 20 nt, synthetic construct
  misc_feature 1..20: note = C9Orf72 GTCN PAM targeting sequence
  source 1..20: mol_type = other RNA
tatgaatatattaataactg

SEQ ID NO: 15827 - RNA, 20 nt, synthetic construct
  misc_feature 1..20: note = C9Orf72 GTCN PAM targeting sequence
  source 1..20: mol_type = other RNA
tattattttaaaatataaat

SEQ ID NO: 15828 - RNA, 20 nt, synthetic construct
  misc_feature 1..20: note = C9Orf72 GTCN PAM targeting sequence
  source 1..20: mol_type = other RNA
ctgtatgtgcagcatgtgtg

SEQ ID NO: 15829 - RNA, 20 nt, synthetic construct
  misc_feature 1..20: note = C9Orf72 GTCN PAM targeting sequence
  source 1..20: mol_type = other RNA
taaaacctgttaaaattcaa

SEQ ID NO: 15830 - RNA, 20 nt, synthetic construct
  misc_feature 1..20: note = C9Orf72 GTCN PAM targeting sequence
  source 1..20: mol_type = other RNA
gaatatatcttctctaatag

SEQ ID NO: 15831 - RNA, 20 nt, synthetic construct
  misc_feature 1..20: note = C9Orf72 GTCN PAM targeting sequence
  source 1..20: mol_type = other RNA
ttggtgtatgcttatcctct

SEQ ID NO: 15832 - RNA, 20 nt, synthetic construct
  misc_feature 1..20: note = C9Orf72 GTCN PAM targeting sequence
  source 1..20: mol_type = other RNA
tggttttgcaagatgcatcc

SEQ ID NO: 15833 - RNA, 20 nt, synthetic construct
  misc_feature 1..20: note = C9Orf72 GTCN PAM targeting sequence
  source 1..20: mol_type = other RNA
agggatgcatcttgcaaaac

SEQ ID NO: 15834 - RNA, 20 nt, synthetic construct
  misc_feature 1..20: note = C9Orf72 GTCN PAM targeting sequence
  source 1..20: mol_type = other RNA
tagaaaaatgagacatctat

SEQ ID NO: 15835 - RNA, 20 nt, synthetic construct
  misc_feature 1..20: note = C9Orf72 GTCN PAM targeting sequence
  source 1..20: mol_type = other RNA
catttttctaggacaagttg

SEQ ID NO: 15836 - RNA, 20 nt, synthetic construct
  misc_feature 1..20: note = C9Orf72 GTCN PAM targeting sequence
  source 1..20: mol_type = other RNA
ttaaaaatagatgtctcatt

SEQ ID NO: 15837 - RNA, 20 nt, synthetic construct
  misc_feature 1..20: note = C9Orf72 GTCN PAM targeting sequence
  source 1..20: mol_type = other RNA
actcacaaagccattcctca

SEQ ID NO: 15838 - RNA, 20 nt, synthetic construct
  misc_feature 1..20: note = C9Orf72 GTCN PAM targeting sequence
  source 1..20: mol_type = other RNA
gcatatcagtgttattgcat

SEQ ID NO: 15839 - RNA, 20 nt, synthetic construct
  misc_feature 1..20: note = C9Orf72 GTCN PAM targeting sequence
  source 1..20: mol_type = other RNA
ctgtgttaggcacctgctct

SEQ ID NO: 15840 - RNA, 20 nt, synthetic construct
  misc_feature 1..20: note = C9Orf72 GTCN PAM targeting sequence
  source 1..20: mol_type = other RNA
gtgtgcagggacacaaaaca

SEQ ID NO: 15841 - RNA, 20 nt, synthetic construct
  misc_feature 1..20: note = C9Orf72 GTCN PAM targeting sequence
  source 1..20: mol_type = other RNA
ctgcacacagaccacggaaa

SEQ ID NO: 15842 - RNA, 20 nt, synthetic construct
  misc_feature 1..20: note = C9Orf72 GTCN PAM targeting sequence
  source 1..20: mol_type = other RNA
tgtgtgaaaatggttatagt

SEQ ID NO: 15843 - RNA, 20 nt, synthetic construct
  misc_feature 1..20: note = C9Orf72 GTCN PAM targeting sequence
  source 1..20: mol_type = other RNA
tttcatttatttctttattt

SEQ ID NO: 15844 - RNA, 20 nt, synthetic construct
  misc_feature 1..20: note = C9Orf72 GTCN PAM targeting sequence
  source 1..20: mol_type = other RNA
aacggcaacgatgagtgaac

SEQ ID NO: 15845 - RNA, 20 nt, synthetic construct
  misc_feature 1..20: note = C9Orf72 GTCN PAM targeting sequence
  source 1..20: mol_type = other RNA
tttgtgaaataaattttaat

SEQ ID NO: 15846 - RNA, 20 nt, synthetic construct
  misc_feature 1..20: note = C9Orf72 GTCN PAM targeting sequence
  source 1..20: mol_type = other RNA
ggggtaaactatttaaactt

SEQ ID NO: 15847 - RNA, 20 nt, synthetic construct
  misc_feature 1..20: note = C9Orf72 GTCN PAM targeting sequence
  source 1..20: mol_type = other RNA
ggaaaacattcaataattct

SEQ ID NO: 15848 - RNA, 20 nt, synthetic construct
  misc_feature 1..20: note = C9Orf72 GTCN PAM targeting sequence
  source 1..20: mol_type = other RNA
ataatggatgatataatata

SEQ ID NO: 15849 - RNA, 20 nt, synthetic construct
  misc_feature 1..20: note = C9Orf72 GTCN PAM targeting sequence
  source 1..20: mol_type = other RNA
tattgttgatgggaagaggt

SEQ ID NO: 15850 - RNA, 20 nt, synthetic construct
  misc_feature 1..20: note = C9Orf72 GTCN PAM targeting sequence
  source 1..20: mol_type = other RNA
ttacctatagtgtcttattt

SEQ ID NO: 15851 - RNA, 20 nt, synthetic construct
  misc_feature 1..20: note = C9Orf72 GTCN PAM targeting sequence
  source 1..20: mol_type = other RNA
tatttagtcgcattatctgt

SEQ ID NO: 15852 - RNA, 20 nt, synthetic construct
  misc_feature 1..20: note = C9Orf72 GTCN PAM targeting sequence
  source 1..20: mol_type = other RNA
cattatctgtagcatcttat

SEQ ID NO: 15853 - RNA, 20 nt, synthetic construct
  misc_feature 1..20: note = C9Orf72 GTCN PAM targeting sequence
  source 1..20: mol_type = other RNA
agaagtatgaagtggttcta

SEQ ID NO: 15854 - RNA, 20 nt, synthetic construct
  misc_feature 1..20: note = C9Orf72 GTCN PAM targeting sequence
  source 1..20: mol_type = other RNA
gtatttatggatcagtatgt

SEQ ID NO: 15855 - RNA, 20 nt, synthetic construct
  misc_feature 1..20: note = C9Orf72 GTCN PAM targeting sequence
  source 1..20: mol_type = other RNA
aagtagttggcagcatgttt

SEQ ID NO: 15856 - RNA, 20 nt, synthetic construct
  misc_feature 1..20: note = C9Orf72 GTCN PAM targeting sequence
  source 1..20: mol_type = other RNA
gacttagaaacagataaaac

SEQ ID NO: 15857 - RNA, 20 nt, synthetic construct
  misc_feature 1..20: note = C9Orf72 GTCN PAM targeting sequence
  source 1..20: mol_type = other RNA
gactaccacacaacattggg

SEQ ID NO: 15858 - RNA, 20 nt, synthetic construct
  misc_feature 1..20: note = C9Orf72 GTCN PAM targeting sequence
  source 1..20: mol_type = other RNA
aaaaggatcatttcacagcc

SEQ ID NO: 15859 - RNA, 20 nt, synthetic construct
  misc_feature 1..20: note = C9Orf72 GTCN PAM targeting sequence
  source 1..20: mol_type = other RNA
agtcttggcaaaaagtagac

SEQ ID NO: 15860 - RNA, 20 nt, synthetic construct
  misc_feature 1..20: note = C9Orf72 GTCN PAM targeting sequence
  source 1..20: mol_type = other RNA
tggcaaaaagtagacaaatg

SEQ ID NO: 15861 - RNA, 20 nt, synthetic construct
  misc_feature 1..20: note = C9Orf72 GTCN PAM targeting sequence
  source 1..20: mol_type = other RNA
actttttgccaagactagac

SEQ ID NO: 15862 - RNA, 20 nt, synthetic construct
  misc_feature 1..20: note = C9Orf72 GTCN PAM targeting sequence
  source 1..20: mol_type = other RNA
gatggaggtgtggaaagcca

SEQ ID NO: 15863 - RNA, 20 nt, synthetic construct
  misc_feature 1..20: note = C9Orf72 GTCN PAM targeting sequence
  source 1..20: mol_type = other RNA
ctcttctgtctctgcctgtc

SEQ ID NO: 15864 - RNA, 20 nt, synthetic construct
  misc_feature 1..20: note = C9Orf72 GTCN PAM targeting sequence
  source 1..20: mol_type = other RNA
ctgcctgtctcccagcctct

SEQ ID NO: 15865 - RNA, 20 nt, synthetic construct
  misc_feature 1..20: note = C9Orf72 GTCN PAM targeting sequence
  source 1..20: mol_type = other RNA
cccagcctctgaggtcctgt

SEQ ID NO: 15866 - RNA, 20 nt, synthetic construct
  misc_feature 1..20: note = C9Orf72 GTCN PAM targeting sequence
  source 1..20: mol_type = other RNA
ctggagctctctttgagtag

SEQ ID NO: 15867 - RNA, 20 nt, synthetic construct
  misc_feature 1..20: note = C9Orf72 GTCN PAM targeting sequence
  source 1..20: mol_type = other RNA
gcatcaactaggctcttgtt

SEQ ID NO: 15868 - RNA, 20 nt, synthetic construct
  misc_feature 1..20: note = C9Orf72 GTCN PAM targeting sequence
  source 1..20: mol_type = other RNA
gccttgatgatctttggaaa

SEQ ID NO: 15869 - RNA, 20 nt, synthetic construct
  misc_feature 1..20: note = C9Orf72 GTCN PAM targeting sequence
  source 1..20: mol_type = other RNA
atagtatgaaagatgccata

SEQ ID NO: 15870 - RNA, 20 nt, synthetic construct
  misc_feature 1..20: note = C9Orf72 GTCN PAM targeting sequence
  source 1..20: mol_type = other RNA
tttatttatttatttattta

SEQ ID NO: 15871 - RNA, 20 nt, synthetic construct
  misc_feature 1..20: note = C9Orf72 GTCN PAM targeting sequence
  source 1..20: mol_type = other RNA
gttttactgcatccttaccc

SEQ ID NO: 15872 - RNA, 20 nt, synthetic construct
  misc_feature 1..20: note = C9Orf72 GTCN PAM targeting sequence
  source 1..20: mol_type = other RNA
tttggtgggttattaaatta

SEQ ID NO: 15873 - RNA, 20 nt, synthetic construct
  misc_feature 1..20: note = C9Orf72 GTCN PAM targeting sequence
  source 1..20: mol_type = other RNA
taagtgtctatcaatgggag

SEQ ID NO: 15874 - RNA, 20 nt, synthetic construct
  misc_feature 1..20: note = C9Orf72 GTCN PAM targeting sequence
  source 1..20: mol_type = other RNA
atcaatgggagaataagtaa

SEQ ID NO: 15875 - RNA, 20 nt, synthetic construct
  misc_feature 1..20: note = C9Orf72 GTCN PAM targeting sequence
  source 1..20: mol_type = other RNA
atccatattttggactactc

SEQ ID NO: 15876 - RNA, 20 nt, synthetic construct
  misc_feature 1..20: note = C9Orf72 GTCN PAM targeting sequence
  source 1..20: mol_type = other RNA
aaaatatggatggactgtag

SEQ ID NO: 15877 - RNA, 20 nt, synthetic construct
  misc_feature 1..20: note = C9Orf72 GTCN PAM targeting sequence
  source 1..20: mol_type = other RNA
tggaaatacatacatatatt

SEQ ID NO: 15878 - RNA, 20 nt, synthetic construct
  misc_feature 1..20: note = C9Orf72 GTCN PAM targeting sequence
  source 1..20: mol_type = other RNA
taggacaatatccacaatgc

SEQ ID NO: 15879 - RNA, 20 nt, synthetic construct
  misc_feature 1..20: note = C9Orf72 GTCN PAM targeting sequence
  source 1..20: mol_type = other RNA
tatgacttgctttcaaccaa

SEQ ID NO: 15880 - RNA, 20 nt, synthetic construct
  misc_feature 1..20: note = C9Orf72 GTCN PAM targeting sequence
  source 1..20: mol_type = other RNA
atatgctttctcagctttcc

SEQ ID NO: 15881 - RNA, 20 nt, synthetic construct
  misc_feature 1..20: note = C9Orf72 GTCN PAM targeting sequence
  source 1..20: mol_type = other RNA
taagaaatcttggctcaaca

SEQ ID NO: 15882 - RNA, 20 nt, synthetic construct
  misc_feature 1..20: note = C9Orf72 GTCN PAM targeting sequence
  source 1..20: mol_type = other RNA
tcattaataaaagctgaagt

SEQ ID NO: 15883 - RNA, 20 nt, synthetic construct
  misc_feature 1..20: note = C9Orf72 GTCN PAM targeting sequence
  source 1..20: mol_type = other RNA
ttttatggttattctctgga

SEQ ID NO: 15884 - RNA, 20 nt, synthetic construct
  misc_feature 1..20: note = C9Orf72 GTCN PAM targeting sequence
  source 1..20: mol_type = other RNA
gtaccatcccctattccaaa

SEQ ID NO: 15885 - RNA, 20 nt, synthetic construct
  misc_feature 1..20: note = C9Orf72 GTCN PAM targeting sequence
  source 1..20: mol_type = other RNA
gaggtttagacgggagatct

SEQ ID NO: 15886 - RNA, 20 nt, synthetic construct
  misc_feature 1..20: note = C9Orf72 GTCN PAM targeting sequence
  source 1..20: mol_type = other RNA
cttttgcctcataaaagagt

SEQ ID NO: 15887 - RNA, 20 nt, synthetic construct
  misc_feature 1..20: note = C9Orf72 GTCN PAM targeting sequence
  source 1..20: mol_type = other RNA
taaatttgtatatatgtata

SEQ ID NO: 15888 - RNA, 20 nt, synthetic construct
  misc_feature 1..20: note = C9Orf72 GTCN PAM targeting sequence
  source 1..20: mol_type = other RNA
ttaaacaaccatgtttgatt

SEQ ID NO: 15889 - RNA, 20 nt, synthetic construct
  misc_feature 1..20: note = C9Orf72 GTCN PAM targeting sequence
  source 1..20: mol_type = other RNA
gatccttcctctcagataac

SEQ ID NO: 15890 - RNA, 20 nt, synthetic construct
  misc_feature 1..20: note = C9Orf72 GTCN PAM targeting sequence
  source 1..20: mol_type = other RNA
tttctcttacctaagtgcct

SEQ ID NO: 15891 - RNA, 20 nt, synthetic construct
  misc_feature 1..20: note = C9Orf72 GTCN PAM targeting sequence
  source 1..20: mol_type = other RNA
ctcaaacactccccaccatc

SEQ ID NO: 15892 - RNA, 20 nt, synthetic construct
  misc_feature 1..20: note = C9Orf72 GTCN PAM targeting sequence
  source 1..20: mol_type = other RNA
ctgtttttttgggatgcagt

SEQ ID NO: 15893 - RNA, 20 nt, synthetic construct
  misc_feature 1..20: note = C9Orf72 GTCN PAM targeting sequence
  source 1..20: mol_type = other RNA
actgaattaccttagtacta

SEQ ID NO: 15894 - RNA, 20 nt, synthetic construct
  misc_feature 1..20: note = C9Orf72 GTCN PAM targeting sequence
  source 1..20: mol_type = other RNA
tgttggctctaaactcttat

SEQ ID NO: 15895 - RNA, 20 nt, synthetic construct
  misc_feature 1..20: note = C9Orf72 GTCN PAM targeting sequence
  source 1..20: mol_type = other RNA
caagaagatcctcaagatct

SEQ ID NO: 15896 - RNA, 20 nt, synthetic construct
  misc_feature 1..20: note = C9Orf72 GTCN PAM targeting sequence
  source 1..20: mol_type = other RNA
ataggcaagaagcatcaagt

SEQ ID NO: 15897 - RNA, 20 nt, synthetic construct
  misc_feature 1..20: note = C9Orf72 GTCN PAM targeting sequence
  source 1..20: mol_type = other RNA
atctgagagtcttagtgtaa

SEQ ID NO: 15898 - RNA, 20 nt, synthetic construct
  misc_feature 1..20: note = C9Orf72 GTCN PAM targeting sequence
  source 1..20: mol_type = other RNA
tactttatcatctagcattt

SEQ ID NO: 15899 - RNA, 20 nt, synthetic construct
  misc_feature 1..20: note = C9Orf72 GTCN PAM targeting sequence
  source 1..20: mol_type = other RNA
ctaagcctggtttaaataaa

SEQ ID NO: 15900 - RNA, 20 nt, synthetic construct
  misc_feature 1..20: note = C9Orf72 GTCN PAM targeting sequence
  source 1..20: mol_type = other RNA
tcatattttatatgtataat

SEQ ID NO: 15901 - RNA, 20 nt, synthetic construct
  misc_feature 1..20: note = C9Orf72 GTCN PAM targeting sequence
  source 1..20: mol_type = other RNA
caatctatccctaccatatt

SEQ ID NO: 15902 - RNA, 20 nt, synthetic construct
  misc_feature 1..20: note = C9Orf72 GTCN PAM targeting sequence
  source 1..20: mol_type = other RNA
ctaattttaaagaccctctt

SEQ ID NO: 15903 - RNA, 20 nt, synthetic construct
  misc_feature 1..20: note = C9Orf72 GTCN PAM targeting sequence
  source 1..20: mol_type = other RNA
ttaaaattagtgacgcttgc

SEQ ID NO: 15904 - RNA, 20 nt, synthetic construct
  misc_feature 1..20: note = C9Orf72 GTCN PAM targeting sequence
  source 1..20: mol_type = other RNA
ctaaatctgcacactctggc

SEQ ID NO: 15905 - RNA, 20 nt, synthetic construct
  misc_feature 1..20: note = C9Orf72 GTCN PAM targeting sequence
  source 1..20: mol_type = other RNA
cctggaggacaaaaactgct

SEQ ID NO: 15906 - RNA, 20 nt, synthetic construct
  misc_feature 1..20: note = C9Orf72 GTCN PAM targeting sequence
  source 1..20: mol_type = other RNA
ggagacaattttggttgtga

SEQ ID NO: 15907 - RNA, 20 nt, synthetic construct
  misc_feature 1..20: note = C9Orf72 GTCN PAM targeting sequence
  source 1..20: mol_type = other RNA
ccagacattaaccaatgtcc

SEQ ID NO: 15908 - RNA, 20 nt, synthetic construct
  misc_feature 1..20: note = C9Orf72 GTCN PAM targeting sequence
  source 1..20: mol_type = other RNA
ttcaaaaattattttatttt

SEQ ID NO: 15909 - RNA, 20 nt, synthetic construct
  misc_feature 1..20: note = C9Orf72 GTCN PAM targeting sequence
  source 1..20: mol_type = other RNA
gccttttggagatatttcat

SEQ ID NO: 15910 - RNA, 20 nt, synthetic construct
  misc_feature 1..20: note = C9Orf72 GTCN PAM targeting sequence
  source 1..20: mol_type = other RNA
tcttgctgtgtgggtagctg

SEQ ID NO: 15911 - RNA, 20 nt, synthetic construct
  misc_feature 1..20: note = C9Orf72 GTCN PAM targeting sequence
  source 1..20: mol_type = other RNA
ttatttaataatgtaaccac

SEQ ID NO: 15912 - RNA, 20 nt, synthetic construct
  misc_feature 1..20: note = C9Orf72 GTCN PAM targeting sequence
  source 1..20: mol_type = other RNA
ataatgaaaatgcacagtag

SEQ ID NO: 15913 - RNA, 20 nt, synthetic construct
  misc_feature 1..20: note = C9Orf72 GTCN PAM targeting sequence
  source 1..20: mol_type = other RNA
cctggggcaatggcatgctt

SEQ ID NO: 15914 - RNA, 20 nt, synthetic construct
  misc_feature 1..20: note = C9Orf72 GTCN PAM targeting sequence
  source 1..20: mol_type = other RNA
gctcaaagaaggtctcctgg

SEQ ID NO: 15915 - RNA, 20 nt, synthetic construct
  misc_feature 1..20: note = C9Orf72 GTCN PAM targeting sequence
  source 1..20: mol_type = other RNA
gaataagttagaataaaaga

SEQ ID NO: 15916 - RNA, 20 nt, synthetic construct
  misc_feature 1..20: note = C9Orf72 GTCN PAM targeting sequence
  source 1..20: mol_type = other RNA
ttgcccatctatctctaacc

SEQ ID NO: 15917 - RNA, 20 nt, synthetic construct
  misc_feature 1..20: note = C9Orf72 GTCN PAM targeting sequence
  source 1..20: mol_type = other RNA
tcttatatttgtctttgccc

SEQ ID NO: 15918 - RNA, 20 nt, synthetic construct
  misc_feature 1..20: note = C9Orf72 GTCN PAM targeting sequence
  source 1..20: mol_type = other RNA
ttgatgtggagtagcattgc

SEQ ID NO: 15919 - RNA, 20 nt, synthetic construct
  misc_feature 1..20: note = C9Orf72 GTCN PAM targeting sequence
  source 1..20: mol_type = other RNA
ttgctaaatctggcaatgct

SEQ ID NO: 15920 - RNA, 20 nt, synthetic construct
  misc_feature 1..20: note = C9Orf72 GTCN PAM targeting sequence
  source 1..20: mol_type = other RNA
catttacatttcagataatc

SEQ ID NO: 15921 - RNA, 20 nt, synthetic construct
  misc_feature 1..20: note = C9Orf72 GTCN PAM targeting sequence
  source 1..20: mol_type = other RNA
cgtgcaatgttagggatata

SEQ ID NO: 15922 - RNA, 20 nt, synthetic construct
  misc_feature 1..20: note = C9Orf72 GTCN PAM targeting sequence
  source 1..20: mol_type = other RNA
actcctcatttctgcctgga

SEQ ID NO: 15923 - RNA, 20 nt, synthetic construct
  misc_feature 1..20: note = C9Orf72 GTCN PAM targeting sequence
  source 1..20: mol_type = other RNA
ggttagctttacatggtcgt

SEQ ID NO: 15924 - RNA, 20 nt, synthetic construct
  misc_feature 1..20: note = C9Orf72 GTCN PAM targeting sequence
  source 1..20: mol_type = other RNA
tacctctatttactctattt

SEQ ID NO: 15925 - RNA, 20 nt, synthetic construct
  misc_feature 1..20: note = C9Orf72 GTCN PAM targeting sequence
  source 1..20: mol_type = other RNA
aacctcttctttacgtatcc

SEQ ID NO: 15926 - RNA, 20 nt, synthetic construct
  misc_feature 1..20: note = C9Orf72 GTCN PAM targeting sequence
  source 1..20: mol_type = other RNA
aaagaatgtaaagcattctc

SEQ ID NO: 15927 - RNA, 20 nt, synthetic construct
  misc_feature 1..20: note = C9Orf72 GTCN PAM targeting sequence
  source 1..20: mol_type = other RNA
tatttcctttccttgtttgt

SEQ ID NO: 15928 - RNA, 20 nt, synthetic construct
  misc_feature 1..20: note = C9Orf72 GTCN PAM targeting sequence
  source 1..20: mol_type = other RNA
agtgcaacctccttagaaaa

SEQ ID NO: 15929 - RNA, 20 nt, synthetic construct
  misc_feature 1..20: note = C9Orf72 GTCN PAM targeting sequence
  source 1..20: mol_type = other RNA
ctgtcaagtgcaacctcctt

SEQ ID NO: 15930 - RNA, 20 nt, synthetic construct
  misc_feature 1..20: note = C9Orf72 GTCN PAM targeting sequence
  source 1..20: mol_type = other RNA
gggggaacacaaaatgcaaa

SEQ ID NO: 15931 - RNA, 20 nt, synthetic construct
  misc_feature 1..20: note = C9Orf72 GTCN PAM targeting sequence
  source 1..20: mol_type = other RNA
aatacaaataacttttttca

SEQ ID NO: 15932 - RNA, 20 nt, synthetic construct
  misc_feature 1..20: note = C9Orf72 GTCN PAM targeting sequence
  source 1..20: mol_type = other RNA
gtactaaaaaaaagtacaaa

SEQ ID NO: 15933 - RNA, 20 nt, synthetic construct
  misc_feature 1..20: note = C9Orf72 GTCN PAM targeting sequence
  source 1..20: mol_type = other RNA
cgaactcctgacctcaggtg

SEQ ID NO: 15934 - RNA, 20 nt, synthetic construct
  misc_feature 1..20: note = C9Orf72 GTCN PAM targeting sequence
  source 1..20: mol_type = other RNA
atgaaaggttgagaaattac

SEQ ID NO: 15935 - RNA, 20 nt, synthetic construct
  misc_feature 1..20: note = C9Orf72 GTCN PAM targeting sequence
  source 1..20: mol_type = other RNA
tgaaagtccatgaaaggttg

SEQ ID NO: 15936 - RNA, 20 nt, synthetic construct
  misc_feature 1..20: note = C9Orf72 GTCN PAM targeting sequence
  source 1..20: mol_type = other RNA
gccagtgctgcggtttcacc

SEQ ID NO: 15937 - RNA, 20 nt, synthetic construct
  misc_feature 1..20: note = C9Orf72 GTCN PAM targeting sequence
  source 1..20: mol_type = other RNA
agcctctggtgaaaccgcag

SEQ ID NO: 15938 - RNA, 20 nt, synthetic construct
  misc_feature 1..20: note = C9Orf72 GTCN PAM targeting sequence
  source 1..20: mol_type = other RNA
catcattacattatggcata

SEQ ID NO: 15939 - RNA, 20 nt, synthetic construct
  misc_feature 1..20: note = C9Orf72 GTCN PAM targeting sequence
  source 1..20: mol_type = other RNA
atgctgaatatataaacaga

SEQ ID NO: 15940 - RNA, 20 nt, synthetic construct
  misc_feature 1..20: note = C9Orf72 GTCN PAM targeting sequence
  source 1..20: mol_type = other RNA
aaagtacacataatccatcc

SEQ ID NO: 15941 - RNA, 20 nt, synthetic construct
  misc_feature 1..20: note = C9Orf72 GTCN PAM targeting sequence
  source 1..20: mol_type = other RNA
tcttaatagtattcagctcc

SEQ ID NO: 15942 - RNA, 20 nt, synthetic construct
  misc_feature 1..20: note = C9Orf72 GTCN PAM targeting sequence
  source 1..20: mol_type = other RNA
taatagtattcagctccaag

SEQ ID NO: 15943 - RNA, 20 nt, synthetic construct
  misc_feature 1..20: note = C9Orf72 GTCN PAM targeting sequence
  source 1..20: mol_type = other RNA
ttaagtattcagaagtgtga

SEQ ID NO: 15944 - RNA, 20 nt, synthetic construct
  misc_feature 1..20: note = C9Orf72 GTCN PAM targeting sequence
  source 1..20: mol_type = other RNA
gccattttatgcttgtgctt

SEQ ID NO: 15945 - RNA, 20 nt, synthetic construct
  misc_feature 1..20: note = C9Orf72 GTCN PAM targeting sequence
  source 1..20: mol_type = other RNA
ttacaacaactgaaaatact

SEQ ID NO: 15946 - RNA, 20 nt, synthetic construct
  misc_feature 1..20: note = C9Orf72 GTCN PAM targeting sequence
  source 1..20: mol_type = other RNA
agttagaaaatttggagaag

SEQ ID NO: 15947 - RNA, 20 nt, synthetic construct
  misc_feature 1..20: note = C9Orf72 GTCN PAM targeting sequence
  source 1..20: mol_type = other RNA
ccatgttgcaagaggtatac

SEQ ID NO: 15948 - RNA, 20 nt, synthetic construct
  misc_feature 1..20: note = C9Orf72 GTCN PAM targeting sequence
  source 1..20: mol_type = other RNA
aactagtttcatttcctcag

SEQ ID NO: 15949 - RNA, 20 nt, synthetic construct
  misc_feature 1..20: note = C9Orf72 GTCN PAM targeting sequence
  source 1..20: mol_type = other RNA
ccagacagtaacatcagctt

SEQ ID NO: 15950 - RNA, 20 nt, synthetic construct
  misc_feature 1..20: note = C9Orf72 GTCN PAM targeting sequence
  source 1..20: mol_type = other RNA
acctaaatggcaaacagaat

SEQ ID NO: 15951 - RNA, 20 nt, synthetic construct
  misc_feature 1..20: note = C9Orf72 GTCN PAM targeting sequence
  source 1..20: mol_type = other RNA
gagatcacacactgagaaaa

SEQ ID NO: 15952 - RNA, 20 nt, synthetic construct
  misc_feature 1..20: note = C9Orf72 GTCN PAM targeting sequence
  source 1..20: mol_type = other RNA
ctcccttgattctgtaccca

SEQ ID NO: 15953 - RNA, 20 nt, synthetic construct
  misc_feature 1..20: note = C9Orf72 GTCN PAM targeting sequence
  source 1..20: mol_type = other RNA
actgaacttaggagcaacca

SEQ ID NO: 15954 - RNA, 20 nt, synthetic construct
  misc_feature 1..20: note = C9Orf72 GTCN PAM targeting sequence
  source 1..20: mol_type = other RNA
cctggcttcagaagcagata

SEQ ID NO: 15955 - RNA, 20 nt, synthetic construct
  misc_feature 1..20: note = C9Orf72 GTCN PAM targeting sequence
  source 1..20: mol_type = other RNA
ctaattagtggcccaaagca

SEQ ID NO: 15956 - RNA, 20 nt, synthetic construct
  misc_feature 1..20: note = C9Orf72 GTCN PAM targeting sequence
  source 1..20: mol_type = other RNA
gatcatttccctttcccaat

SEQ ID NO: 15957 - RNA, 20 nt, synthetic construct
  misc_feature 1..20: note = C9Orf72 GTCN PAM targeting sequence
  source 1..20: mol_type = other RNA
ccacaatgtctgatcatttc

SEQ ID NO: 15958 - RNA, 20 nt, synthetic construct
  misc_feature 1..20: note = C9Orf72 GTCN PAM targeting sequence
  source 1..20: mol_type = other RNA
agtagtccccacaatgtctg

SEQ ID NO: 15959 - RNA, 20 nt, synthetic construct
  misc_feature 1..20: note = C9Orf72 GTCN PAM targeting sequence
  source 1..20: mol_type = other RNA
cctggaatcaagatcagctc

SEQ ID NO: 15960 - RNA, 20 nt, synthetic construct
  misc_feature 1..20: note = C9Orf72 GTCN PAM targeting sequence
  source 1..20: mol_type = other RNA
tccagttaaagtaggggctt

SEQ ID NO: 15961 - RNA, 20 nt, synthetic construct
  misc_feature 1..20: note = C9Orf72 GTCN PAM targeting sequence
  source 1..20: mol_type = other RNA
atgccaattatgcatgctgg

SEQ ID NO: 15962 - RNA, 20 nt, synthetic construct
  misc_feature 1..20: note = C9Orf72 GTCN PAM targeting sequence
  source 1..20: mol_type = other RNA
ggaagccaatgtgagtgttc

SEQ ID NO: 15963 - RNA, 20 nt, synthetic construct
  misc_feature 1..20: note = C9Orf72 GTCN PAM targeting sequence
  source 1..20: mol_type = other RNA
tctgcacaggccaaatggga

SEQ ID NO: 15964 - RNA, 20 nt, synthetic construct
  misc_feature 1..20: note = C9Orf72 GTCN PAM targeting sequence
  source 1..20: mol_type = other RNA
gggagaatgacagtggatta

SEQ ID NO: 15965 - RNA, 20 nt, synthetic construct
  misc_feature 1..20: note = C9Orf72 GTCN PAM targeting sequence
  source 1..20: mol_type = other RNA
ttctcccagacccatctgtc

SEQ ID NO: 15966 - RNA, 20 nt, synthetic construct
  misc_feature 1..20: note = C9Orf72 GTCN PAM targeting sequence
  source 1..20: mol_type = other RNA
ctggccatccagccaaacca

SEQ ID NO: 15967 - RNA, 20 nt, synthetic construct
  misc_feature 1..20: note = C9Orf72 GTCN PAM targeting sequence
  source 1..20: mol_type = other RNA
tgcttcttccaagtctctgg

SEQ ID NO: 15968 - RNA, 20 nt, synthetic construct
  misc_feature 1..20: note = C9Orf72 GTCN PAM targeting sequence
  source 1..20: mol_type = other RNA
ccaattttccagtcatgctt

SEQ ID NO: 15969 - RNA, 20 nt, synthetic construct
  misc_feature 1..20: note = C9Orf72 GTCN PAM targeting sequence
  source 1..20: mol_type = other RNA
atccacatacctcttcctca

SEQ ID NO: 15970 - RNA, 20 nt, synthetic construct
  misc_feature 1..20: note = C9Orf72 GTCN PAM targeting sequence
  source 1..20: mol_type = other RNA
aaaactgtgaagatatttgt

SEQ ID NO: 15971 - RNA, 20 nt, synthetic construct
  misc_feature 1..20: note = C9Orf72 GTCN PAM targeting sequence
  source 1..20: mol_type = other RNA
cccattggtgagcactcata

SEQ ID NO: 15972 - RNA, 20 nt, synthetic construct
  misc_feature 1..20: note = C9Orf72 GTCN PAM targeting sequence
  source 1..20: mol_type = other RNA
gaggcaatgctgtgtggagt

SEQ ID NO: 15973 - RNA, 20 nt, synthetic construct
  misc_feature 1..20: note = C9Orf72 GTCN PAM targeting sequence
  source 1..20: mol_type = other RNA
tagtcagaggcaatgctgtg

SEQ ID NO: 15974 - RNA, 20 nt, synthetic construct
  misc_feature 1..20: note = C9Orf72 GTCN PAM targeting sequence
  source 1..20: mol_type = other RNA
tatcatgttccccatcaccc

SEQ ID NO: 15975 - RNA, 20 nt, synthetic construct
  misc_feature 1..20: note = C9Orf72 GTCN PAM targeting sequence
  source 1..20: mol_type = other RNA
caattacaatgccaactagg

SEQ ID NO: 15976 - RNA, 20 nt, synthetic construct
  misc_feature 1..20: note = C9Orf72 GTCN PAM targeting sequence
  source 1..20: mol_type = other RNA
cctagttggcattgtaattg

SEQ ID NO: 15977 - RNA, 20 nt, synthetic construct
  misc_feature 1..20: note = C9Orf72 GTCN PAM targeting sequence
  source 1..20: mol_type = other RNA
tgtgatcatagctgatattg

SEQ ID NO: 15978 - RNA, 20 nt, synthetic construct
  misc_feature 1..20: note = C9Orf72 GTCN PAM targeting sequence
  source 1..20: mol_type = other RNA
tcatttctgcagctggtcat

SEQ ID NO: 15979 - RNA, 20 nt, synthetic construct
  misc_feature 1..20: note = C9Orf72 GTCN PAM targeting sequence
  source 1..20: mol_type = other RNA
tgattatttcctccttctgt

SEQ ID NO: 15980 - RNA, 20 nt, synthetic construct
  misc_feature 1..20: note = C9Orf72 GTCN PAM targeting sequence
  source 1..20: mol_type = other RNA
catgataaagtaaacaggaa

SEQ ID NO: 15981 - RNA, 20 nt, synthetic construct
  misc_feature 1..20: note = C9Orf72 GTCN PAM targeting sequence
  source 1..20: mol_type = other RNA
ataaatctcatgtcacatga

SEQ ID NO: 15982 - RNA, 20 nt, synthetic construct
  misc_feature 1..20: note = C9Orf72 GTCN PAM targeting sequence
  source 1..20: mol_type = other RNA
ccaactcaaatactattaca

SEQ ID NO: 15983 - RNA, 20 nt, synthetic construct
  misc_feature 1..20: note = C9Orf72 GTCN PAM targeting sequence
  source 1..20: mol_type = other RNA
taattatgcctaacataata

SEQ ID NO: 15984 - RNA, 20 nt, synthetic construct
  misc_feature 1..20: note = C9Orf72 GTCN PAM targeting sequence
  source 1..20: mol_type = other RNA
ttatttgaagattatgatct

SEQ ID NO: 15985 - RNA, 20 nt, synthetic construct
  misc_feature 1..20: note = C9Orf72 GTCN PAM targeting sequence
  source 1..20: mol_type = other RNA
acccctcgccaacttgaacc

SEQ ID NO: 15986 - RNA, 20 nt, synthetic construct
  misc_feature 1..20: note = C9Orf72 GTCN PAM targeting sequence
  source 1..20: mol_type = other RNA
gtgagggtgttgccaaagga

SEQ ID NO: 15987 - RNA, 20 nt, synthetic construct
  misc_feature 1..20: note = C9Orf72 GTCN PAM targeting sequence
  source 1..20: mol_type = other RNA
gtgggctgggaaaggcagac

SEQ ID NO: 15988 - RNA, 20 nt, synthetic construct
  misc_feature 1..20: note = C9Orf72 GTCN PAM targeting sequence
  source 1..20: mol_type = other RNA
gcctttcccagcccactgac

SEQ ID NO: 15989 - RNA, 20 nt, synthetic construct
  misc_feature 1..20: note = C9Orf72 GTCN PAM targeting sequence
  source 1..20: mol_type = other RNA
ctcattcctaccattcagac

SEQ ID NO: 15990 - RNA, 20 nt, synthetic construct
  misc_feature 1..20: note = C9Orf72 GTCN PAM targeting sequence
  source 1..20: mol_type = other RNA
gaatggtaggaatgagggac

SEQ ID NO: 15991 - RNA, 20 nt, synthetic construct
  misc_feature 1..20: note = C9Orf72 GTCN PAM targeting sequence
  source 1..20: mol_type = other RNA
tatgcagagaccagaccctc

SEQ ID NO: 15992 - RNA, 20 nt, synthetic construct
  misc_feature 1..20: note = C9Orf72 GTCN PAM targeting sequence
  source 1..20: mol_type = other RNA
cattattaaagtattaaaga

SEQ ID NO: 15993 - RNA, 20 nt, synthetic construct
  misc_feature 1..20: note = C9Orf72 GTCN PAM targeting sequence
  source 1..20: mol_type = other RNA
ctcacagtttttacctgtcc

SEQ ID NO: 15994 - RNA, 20 nt, synthetic construct
  misc_feature 1..20: note = C9Orf72 GTCN PAM targeting sequence
  source 1..20: mol_type = other RNA
agggtgataaaagctcttgc

SEQ ID NO: 15995 - RNA, 20 nt, synthetic construct
  misc_feature 1..20: note = C9Orf72 GTCN PAM targeting sequence
  source 1..20: mol_type = other RNA
cacttgatctatgatcttta

SEQ ID NO: 15996 - RNA, 20 nt, synthetic construct
  misc_feature 1..20: note = C9Orf72 GTCN PAM targeting sequence
  source 1..20: mol_type = other RNA
ctgtggatcagcagacttag

SEQ ID NO: 15997 - RNA, 20 nt, synthetic construct
  misc_feature 1..20: note = C9Orf72 GTCN PAM targeting sequence
  source 1..20: mol_type = other RNA
gctgatccacagagactgtg

SEQ ID NO: 15998 - RNA, 20 nt, synthetic construct
  misc_feature 1..20: note = C9Orf72 GTCN PAM targeting sequence
  source 1..20: mol_type = other RNA
aggctgcccagattcctcag

SEQ ID NO: 15999 - RNA, 20 nt, synthetic construct
  misc_feature 1..20: note = C9Orf72 GTCN PAM targeting sequence
  source 1..20: mol_type = other RNA
cttggtagagggagtgtgct

SEQ ID NO: 16000 - RNA, 20 nt, synthetic construct
  misc_feature 1..20: note = C9Orf72 GTCN PAM targeting sequence
  source 1..20: mol_type = other RNA
aagtgctttgttaagtgggt

SEQ ID NO: 16001 - RNA, 20 nt, synthetic construct
  misc_feature 1..20: note = C9Orf72 GTCN PAM targeting sequence
  source 1..20: mol_type = other RNA
tgttccccacgccacccaac

SEQ ID NO: 16002 - RNA, 20 nt, synthetic construct
  misc_feature 1..20: note = C9Orf72 GTCN PAM targeting sequence
  source 1..20: mol_type = other RNA
cacccagttgggtggcgtgg

SEQ ID NO: 16003 - RNA, 20 nt, synthetic construct
  misc_feature 1..20: note = C9Orf72 GTCN PAM targeting sequence
  source 1..20: mol_type = other RNA
gccaacctctgttggagggt

SEQ ID NO: 16004 - RNA, 20 nt, synthetic construct
  misc_feature 1..20: note = C9Orf72 GTCN PAM targeting sequence
  source 1..20: mol_type = other RNA
agttctgcactcttgctgga

SEQ ID NO: 16005 - RNA, 20 nt, synthetic construct
  misc_feature 1..20: note = C9Orf72 GTCN PAM targeting sequence
  source 1..20: mol_type = other RNA
aactcatcctctgtccagtt

SEQ ID NO: 16006 - RNA, 20 nt, synthetic construct
  misc_feature 1..20: note = C9Orf72 GTCN PAM targeting sequence
  source 1..20: mol_type = other RNA
attcgtccaactcatcctct

SEQ ID NO: 16007 - RNA, 20 nt, synthetic construct
  misc_feature 1..20: note = C9Orf72 GTCN PAM targeting sequence
  source 1..20: mol_type = other RNA
aattcagctgttgatacttg

SEQ ID NO: 16008 - RNA, 20 nt, synthetic construct
  misc_feature 1..20: note = C9Orf72 GTCN PAM targeting sequence
  source 1..20: mol_type = other RNA
tcaaactctgatatccttta

SEQ ID NO: 16009 - RNA, 20 nt, synthetic construct
  misc_feature 1..20: note = C9Orf72 GTCN PAM targeting sequence
  source 1..20: mol_type = other RNA
gcatgccttatttcagcaag

SEQ ID NO: 16010 - RNA, 20 nt, synthetic construct
  misc_feature 1..20: note = C9Orf72 GTCN PAM targeting sequence
  source 1..20: mol_type = other RNA
catatttcttggaggctctg

SEQ ID NO: 16011 - RNA, 20 nt, synthetic construct
  misc_feature 1..20: note = C9Orf72 GTCN PAM targeting sequence
  source 1..20: mol_type = other RNA
atattagacagatcaacaag

SEQ ID NO: 16012 - RNA, 20 nt, synthetic construct
  misc_feature 1..20: note = C9Orf72 GTCN PAM targeting sequence
  source 1..20: mol_type = other RNA
aatattgacagtgggatgtt

SEQ ID NO: 16013 - RNA, 20 nt, synthetic construct
  misc_feature 1..20: note = C9Orf72 GTCN PAM targeting sequence
  source 1..20: mol_type = other RNA
tgttgatctgtctaatattg

SEQ ID NO: 16014 - RNA, 20 nt, synthetic construct
  misc_feature 1..20: note = C9Orf72 GTCN PAM targeting sequence
  source 1..20: mol_type = other RNA
tgaatatttttgttaatttt

SEQ ID NO: 16015 - RNA, 20 nt, synthetic construct
  misc_feature 1..20: note = C9Orf72 GTCN PAM targeting sequence
  source 1..20: mol_type = other RNA
acttgatccagaactgagtt

SEQ ID NO: 16016 - RNA, 20 nt, synthetic construct
  misc_feature 1..20: note = C9Orf72 GTCN PAM targeting sequence
  source 1..20: mol_type = other RNA
attaggtccacttgatccag

SEQ ID NO: 16017 - RNA, 20 nt, synthetic construct
  misc_feature 1..20: note = C9Orf72 GTCN PAM targeting sequence
  source 1..20: mol_type = other RNA
agaaatttatccatttcttc

SEQ ID NO: 16018 - RNA, 20 nt, synthetic construct
  misc_feature 1..20: note = C9Orf72 GTCN PAM targeting sequence
  source 1..20: mol_type = other RNA
gcttcatctctgggatgcaa

SEQ ID NO: 16019 - RNA, 20 nt, synthetic construct
  misc_feature 1..20: note = C9Orf72 GTCN PAM targeting sequence
  source 1..20: mol_type = other RNA
ttggttctgtttatgcgatg

SEQ ID NO: 16020 - RNA, 20 nt, synthetic construct
  misc_feature 1..20: note = C9Orf72 GTCN PAM targeting sequence
  source 1..20: mol_type = other RNA
cagcccaaaaactccttaag

SEQ ID NO: 16021 - RNA, 20 nt, synthetic construct
  misc_feature 1..20: note = C9Orf72 GTCN PAM targeting sequence
  source 1..20: mol_type = other RNA
caggatacaaaatcaatgtg

SEQ ID NO: 16022 - RNA, 20 nt, synthetic construct
  misc_feature 1..20: note = C9Orf72 GTCN PAM targeting sequence
  source 1..20: mol_type = other RNA
tttcttatttccttaagcag

SEQ ID NO: 16023 - RNA, 20 nt, synthetic construct
  misc_feature 1..20: note = C9Orf72 GTCN PAM targeting sequence
  source 1..20: mol_type = other RNA
aaagtactttacagattcaa

SEQ ID NO: 16024 - RNA, 20 nt, synthetic construct
  misc_feature 1..20: note = C9Orf72 GTCN PAM targeting sequence
  source 1..20: mol_type = other RNA
tctttgattccacatgaaat

SEQ ID NO: 16025 - RNA, 20 nt, synthetic construct
  misc_feature 1..20: note = C9Orf72 GTCN PAM targeting sequence
  source 1..20: mol_type = other RNA
tggctctacagggtcttctt

SEQ ID NO: 16026 - RNA, 20 nt, synthetic construct
  misc_feature 1..20: note = C9Orf72 GTCN PAM targeting sequence
  source 1..20: mol_type = other RNA
ctagctttgttctttttgct

SEQ ID NO: 16027 - RNA, 20 nt, synthetic construct
  misc_feature 1..20: note = C9Orf72 GTCN PAM targeting sequence
  source 1..20: mol_type = other RNA
gttagcgtgatgtctctagc

SEQ ID NO: 16028 - RNA, 20 nt, synthetic construct
  misc_feature 1..20: note = C9Orf72 GTCN PAM targeting sequence
  source 1..20: mol_type = other RNA
atatatctgttttggtacca

SEQ ID NO: 16029 - RNA, 20 nt, synthetic construct
  misc_feature 1..20: note = C9Orf72 GTCN PAM targeting sequence
  source 1..20: mol_type = other RNA
ctgttctgctccattggtct

SEQ ID NO: 16030 - RNA, 20 nt, synthetic construct
  misc_feature 1..20: note = C9Orf72 GTCN PAM targeting sequence
  source 1..20: mol_type = other RNA
gtcagaatagacaacaagtc

SEQ ID NO: 16031 - RNA, 20 nt, synthetic construct
  misc_feature 1..20: note = C9Orf72 GTCN PAM targeting sequence
  source 1..20: mol_type = other RNA
gaatagacaacaagtcccaa

SEQ ID NO: 16032 - RNA, 20 nt, synthetic construct
  misc_feature 1..20: note = C9Orf72 GTCN PAM targeting sequence
  source 1..20: mol_type = other RNA
attctgacggacattttcta

SEQ ID NO: 16033 - RNA, 20 nt, synthetic construct
  misc_feature 1..20: note = C9Orf72 GTCN PAM targeting sequence
  source 1..20: mol_type = other RNA
caaagcttttgacctggaag

SEQ ID NO: 16034 - RNA, 20 nt, synthetic construct
  misc_feature 1..20: note = C9Orf72 GTCN PAM targeting sequence
  source 1..20: mol_type = other RNA
aaagctttgggacttgttgt

SEQ ID NO: 16035 - RNA, 20 nt, synthetic construct
  misc_feature 1..20: note = C9Orf72 GTCN PAM targeting sequence
  source 1..20: mol_type = other RNA
tagtggattcatcgatgttc

SEQ ID NO: 16036 - RNA, 20 nt, synthetic construct
  misc_feature 1..20: note = C9Orf72 GTCN PAM targeting sequence
  source 1..20: mol_type = other RNA
ttgccctgtggctatgataa

SEQ ID NO: 16037 - RNA, 20 nt, synthetic construct
  misc_feature 1..20: note = C9Orf72 GTCN PAM targeting sequence
  source 1..20: mol_type = other RNA
ggaaatagtctcctgatgga

SEQ ID NO: 16038 - RNA, 20 nt, synthetic construct
  misc_feature 1..20: note = C9Orf72 GTCN PAM targeting sequence
  source 1..20: mol_type = other RNA
cctgatggaagatggaattg

SEQ ID NO: 16039 - RNA, 20 nt, synthetic construct
  misc_feature 1..20: note = C9Orf72 GTCN PAM targeting sequence
  source 1..20: mol_type = other RNA
ggtagaggggatggcctgat

SEQ ID NO: 16040 - RNA, 20 nt, synthetic construct
  misc_feature 1..20: note = C9Orf72 GTCN PAM targeting sequence
  source 1..20: mol_type = other RNA
ctgtaagctatatcaggcca

SEQ ID NO: 16041 - RNA, 20 nt, synthetic construct
  misc_feature 1..20: note = C9Orf72 GTCN PAM targeting sequence
  source 1..20: mol_type = other RNA
ttttcaaaaagtaaagaact

SEQ ID NO: 16042 - RNA, 20 nt, synthetic construct
  misc_feature 1..20: note = C9Orf72 GTCN PAM targeting sequence
  source 1..20: mol_type = other RNA
agttatccctatttgaaaac

SEQ ID NO: 16043 - RNA, 20 nt, synthetic construct
  misc_feature 1..20: note = C9Orf72 GTCN PAM targeting sequence
  source 1..20: mol_type = other RNA
atcattcttacatagtactc

SEQ ID NO: 16044 - RNA, 20 nt, synthetic construct
  misc_feature 1..20: note = C9Orf72 GTCN PAM targeting sequence
  source 1..20: mol_type = other RNA
gtcatataacagtatagtac

SEQ ID NO: 16045 - RNA, 20 nt, synthetic construct
  misc_feature 1..20: note = C9Orf72 GTCN PAM targeting sequence
  source 1..20: mol_type = other RNA
tataacagtatagtacataa

SEQ ID NO: 16046 - RNA, 20 nt, synthetic construct
  misc_feature 1..20: note = C9Orf72 GTCN PAM targeting sequence
  source 1..20: mol_type = other RNA
ccttagagtgtactcattct

SEQ ID NO: 16047 - RNA, 20 nt, synthetic construct
  misc_feature 1..20: note = C9Orf72 GTCN PAM targeting sequence
  source 1..20: mol_type = other RNA
ttcaaaaagtattccagaag

SEQ ID NO: 16048 - RNA, 20 nt, synthetic construct
  misc_feature 1..20: note = C9Orf72 GTCN PAM targeting sequence
  source 1..20: mol_type = other RNA
tagcttgctgtaacttttta

SEQ ID NO: 16049 - RNA, 20 nt, synthetic construct
  misc_feature 1..20: note = C9Orf72 GTCN PAM targeting sequence
  source 1..20: mol_type = other RNA
acagtagtgtgtagtaaagt

SEQ ID NO: 16050 - RNA, 20 nt, synthetic construct
  misc_feature 1..20: note = C9Orf72 GTCN PAM targeting sequence
  source 1..20: mol_type = other RNA
cttaaagtcaattatgtctt

SEQ ID NO: 16051 - RNA, 20 nt, synthetic construct
  misc_feature 1..20: note = C9Orf72 GTCN PAM targeting sequence
  source 1..20: mol_type = other RNA
attatgtctttacagtaata

SEQ ID NO: 16052 - RNA, 20 nt, synthetic construct
  misc_feature 1..20: note = C9Orf72 GTCN PAM targeting sequence
  source 1..20: mol_type = other RNA
actgctggtctgctttctgt

SEQ ID NO: 16053 - RNA, 20 nt, synthetic construct
  misc_feature 1..20: note = C9Orf72 GTCN PAM targeting sequence
  source 1..20: mol_type = other RNA
gctttctgttaccatagatt

SEQ ID NO: 16054 - RNA, 20 nt, synthetic construct
  misc_feature 1..20: note = C9Orf72 GTCN PAM targeting sequence
  source 1..20: mol_type = other RNA
agagaagtaaaatgcatgtc

SEQ ID NO: 16055 - RNA, 20 nt, synthetic construct
  misc_feature 1..20: note = C9Orf72 GTCN PAM targeting sequence
  source 1..20: mol_type = other RNA
attttagcctcaaataaata

SEQ ID NO: 16056 - RNA, 20 nt, synthetic construct
  misc_feature 1..20: note = C9Orf72 GTCN PAM targeting sequence
  source 1..20: mol_type = other RNA
ttctttttatcttagttggt

SEQ ID NO: 16057 - RNA, 20 nt, synthetic construct
  misc_feature 1..20: note = C9Orf72 GTCN PAM targeting sequence
  source 1..20: mol_type = other RNA
tttgtagtgttgcctatatt

SEQ ID NO: 16058 - RNA, 20 nt, synthetic construct
  misc_feature 1..20: note = C9Orf72 GTCN PAM targeting sequence
  source 1..20: mol_type = other RNA
aatatgttctttcaactctg

SEQ ID NO: 16059 - RNA, 20 nt, synthetic construct
  misc_feature 1..20: note = C9Orf72 GTCN PAM targeting sequence
  source 1..20: mol_type = other RNA
tttcctgaaagacgtattct

SEQ ID NO: 16060 - RNA, 20 nt, synthetic construct
  misc_feature 1..20: note = C9Orf72 GTCN PAM targeting sequence
  source 1..20: mol_type = other RNA
ttcaggaaatgacagagttg

SEQ ID NO: 16061 - RNA, 20 nt, synthetic construct
  misc_feature 1..20: note = C9Orf72 GTCN PAM targeting sequence
  source 1..20: mol_type = other RNA
tgagaatttgaacttctatc

SEQ ID NO: 16062 - RNA, 20 nt, synthetic construct
  misc_feature 1..20: note = C9Orf72 GTCN PAM targeting sequence
  source 1..20: mol_type = other RNA
ttttgaaagaaaattctttc

SEQ ID NO: 16063 - RNA, 20 nt, synthetic construct
  misc_feature 1..20: note = C9Orf72 GTCN PAM targeting sequence
  source 1..20: mol_type = other RNA
aattaaaattggctagactg

SEQ ID NO: 16064 - RNA, 20 nt, synthetic construct
  misc_feature 1..20: note = C9Orf72 GTCN PAM targeting sequence
  source 1..20: mol_type = other RNA
agccaattttaattagactt

SEQ ID NO: 16065 - RNA, 20 nt, synthetic construct
  misc_feature 1..20: note = C9Orf72 GTCN PAM targeting sequence
  source 1..20: mol_type = other RNA
aatagggtgattgtagctca

SEQ ID NO: 16066 - RNA, 20 nt, synthetic construct
  misc_feature 1..20: note = C9Orf72 GTCN PAM targeting sequence
  source 1..20: mol_type = other RNA
aaatacaggcttcaggttca

SEQ ID NO: 16067 - RNA, 20 nt, synthetic construct
  misc_feature 1..20: note = C9Orf72 GTCN PAM targeting sequence
  source 1..20: mol_type = other RNA
ttaactcatcagggtgtaaa

SEQ ID NO: 16068 - RNA, 20 nt, synthetic construct
  misc_feature 1..20: note = C9Orf72 GTCN PAM targeting sequence
  source 1..20: mol_type = other RNA
agaaagaggctgtacaagtg

SEQ ID NO: 16069 - RNA, 20 nt, synthetic construct
  misc_feature 1..20: note = C9Orf72 GTCN PAM targeting sequence
  source 1..20: mol_type = other RNA
tgtatcacttgtacagcctc

SEQ ID NO: 16070 - RNA, 20 nt, synthetic construct
  misc_feature 1..20: note = C9Orf72 GTCN PAM targeting sequence
  source 1..20: mol_type = other RNA
atgaaaatattgtcattaaa

SEQ ID NO: 16071 - RNA, 20 nt, synthetic construct
  misc_feature 1..20: note = C9Orf72 GTCN PAM targeting sequence
  source 1..20: mol_type = other RNA
ttaaaaattttctgggacca

SEQ ID NO: 16072 - RNA, 20 nt, synthetic construct
  misc_feature 1..20: note = C9Orf72 GTCN PAM targeting sequence
  source 1..20: mol_type = other RNA
cagaaaatttttaatgacaa

SEQ ID NO: 16073 - RNA, 20 nt, synthetic construct
  misc_feature 1..20: note = C9Orf72 GTCN PAM targeting sequence
  source 1..20: mol_type = other RNA
cagttttctattagagagct

SEQ ID NO: 16074 - RNA, 20 nt, synthetic construct
  misc_feature 1..20: note = C9Orf72 GTCN PAM targeting sequence
  source 1..20: mol_type = other RNA
ctttactaagtagaaaatga

SEQ ID NO: 16075 - RNA, 20 nt, synthetic construct
  misc_feature 1..20: note = C9Orf72 GTCN PAM targeting sequence
  source 1..20: mol_type = other RNA
tatatttataactggagtgt

SEQ ID NO: 16076 - RNA, 20 nt, synthetic construct
  misc_feature 1..20: note = C9Orf72 GTCN PAM targeting sequence
  source 1..20: mol_type = other RNA
cactccagttataaatataa

SEQ ID NO: 16077 - RNA, 20 nt, synthetic construct
  misc_feature 1..20: note = C9Orf72 GTCN PAM targeting sequence
  source 1..20: mol_type = other RNA
ggccgggcacggtggctcac

SEQ ID NO: 16078 - RNA, 20 nt, synthetic construct
  misc_feature 1..20: note = C9Orf72 GTCN PAM targeting sequence
  source 1..20: mol_type = other RNA
ttaggattcattaaaataca

SEQ ID NO: 16079 - RNA, 20 nt, synthetic construct
  misc_feature 1..20: note = C9Orf72 GTCN PAM targeting sequence
  source 1..20: mol_type = other RNA
tttaaatattaactcacaga

SEQ ID NO: 16080 - RNA, 20 nt, synthetic construct
  misc_feature 1..20: note = C9Orf72 GTCN PAM targeting sequence
  source 1..20: mol_type = other RNA
gggtttttttgtataagccc

SEQ ID NO: 16081 - RNA, 20 nt, synthetic construct
  misc_feature 1..20: note = C9Orf72 GTCN PAM targeting sequence
  source 1..20: mol_type = other RNA
ttaaactccaggggcttata

SEQ ID NO: 16082 - RNA, 20 nt, synthetic construct
  misc_feature 1..20: note = C9Orf72 GTCN PAM targeting sequence
  source 1..20: mol_type = other RNA
gttcatagtgagaaccatcc

SEQ ID NO: 16083 - RNA, 20 nt, synthetic construct
  misc_feature 1..20: note = C9Orf72 GTCN PAM targeting sequence
  source 1..20: mol_type = other RNA
ttttcttatgcaataaaatc

SEQ ID NO: 16084 - RNA, 20 nt, synthetic construct
  misc_feature 1..20: note = C9Orf72 GTCN PAM targeting sequence
  source 1..20: mol_type = other RNA
ctgctcagtcattttcttat

SEQ ID NO: 16085 - RNA, 20 nt, synthetic construct
  misc_feature 1..20: note = C9Orf72 GTCN PAM targeting sequence
  source 1..20: mol_type = other RNA
gctgatagactataatttgc

SEQ ID NO: 16086 - RNA, 20 nt, synthetic construct
  misc_feature 1..20: note = C9Orf72 GTCN PAM targeting sequence
  source 1..20: mol_type = other RNA
atcagcagacacagctcact

SEQ ID NO: 16087 - RNA, 20 nt, synthetic construct
  misc_feature 1..20: note = C9Orf72 GTCN PAM targeting sequence
  source 1..20: mol_type = other RNA
gcaaattatagtctatcagc

SEQ ID NO: 16088 - RNA, 20 nt, synthetic construct
  misc_feature 1..20: note = C9Orf72 GTCN PAM targeting sequence
  source 1..20: mol_type = other RNA
aagcagatttgagatttgtg

SEQ ID NO: 16089 - RNA, 20 nt, synthetic construct
  misc_feature 1..20: note = C9Orf72 GTCN PAM targeting sequence
  source 1..20: mol_type = other RNA
caaatctcaaatctgctttg

SEQ ID NO: 16090 - RNA, 20 nt, synthetic construct
  misc_feature 1..20: note = C9Orf72 GTCN PAM targeting sequence
  source 1..20: mol_type = other RNA
acaattctgtcgcagcagtg

SEQ ID NO: 16091 - RNA, 20 nt, synthetic construct
  misc_feature 1..20: note = C9Orf72 GTCN PAM targeting sequence
  source 1..20: mol_type = other RNA
cagcagtgaaccatgtcatg

SEQ ID NO: 16092 - RNA, 20 nt, synthetic construct
  misc_feature 1..20: note = C9Orf72 GTCN PAM targeting sequence
  source 1..20: mol_type = other RNA
tgcacaatcttattctacca

SEQ ID NO: 16093 - RNA, 20 nt, synthetic construct
  misc_feature 1..20: note = C9Orf72 GTCN PAM targeting sequence
  source 1..20: mol_type = other RNA
tatatatatatatatatata

SEQ ID NO: 16094 - RNA, 20 nt, synthetic construct
  misc_feature 1..20: note = C9Orf72 GTCN PAM targeting sequence
  source 1..20: mol_type = other RNA
caacagcctatattccagac

SEQ ID NO: 16095 - RNA, 20 nt, synthetic construct
  misc_feature 1..20: note = C9Orf72 GTCN PAM targeting sequence
  source 1..20: mol_type = other RNA
ggaatataggctgttgtgac

SEQ ID NO: 16096 - RNA, 20 nt, synthetic construct
  misc_feature 1..20: note = C9Orf72 GTCN PAM targeting sequence
  source 1..20: mol_type = other RNA
tcagaaaatattgaggatag

SEQ ID NO: 16097 - RNA, 20 nt, synthetic construct
  misc_feature 1..20: note = C9Orf72 GTCN PAM targeting sequence
  source 1..20: mol_type = other RNA
tattactttttttaatgtca

SEQ ID NO: 16098 - RNA, 20 nt, synthetic construct
  misc_feature 1..20: note = C9Orf72 GTCN PAM targeting sequence
  source 1..20: mol_type = other RNA
acagaaaagagatctgtctt

SEQ ID NO: 16099 - RNA, 20 nt, synthetic construct
  misc_feature 1..20: note = C9Orf72 GTCN PAM targeting sequence
  source 1..20: mol_type = other RNA
gtcagagatcaaaaaagttt

SEQ ID NO: 16100 - RNA, 20 nt, synthetic construct
  misc_feature 1..20: note = C9Orf72 GTCN PAM targeting sequence
  source 1..20: mol_type = other RNA
gagatcaaaaaagttttgta

SEQ ID NO: 16101 - RNA, 20 nt, synthetic construct
  misc_feature 1..20: note = C9Orf72 GTCN PAM targeting sequence
  source 1..20: mol_type = other RNA
ctttcgccaaataacataac

SEQ ID NO: 16102 - RNA, 20 nt, synthetic construct
  misc_feature 1..20: note = C9Orf72 GTCN PAM targeting sequence
  source 1..20: mol_type = other RNA
tcaccttaataacatctgca

SEQ ID NO: 16103 - RNA, 20 nt, synthetic construct
  misc_feature 1..20: note = C9Orf72 GTCN PAM targeting sequence
  source 1..20: mol_type = other RNA
agagttccccactgtgtaat

SEQ ID NO: 16104 - RNA, 20 nt, synthetic construct
  misc_feature 1..20: note = C9Orf72 GTCN PAM targeting sequence
  source 1..20: mol_type = other RNA
gggtggctgggctagatact

SEQ ID NO: 16105 - RNA, 20 nt, synthetic construct
  misc_feature 1..20: note = C9Orf72 GTCN PAM targeting sequence
  source 1..20: mol_type = other RNA
aaagtctgggtggctgggct

SEQ ID NO: 16106 - RNA, 20 nt, synthetic construct
  misc_feature 1..20: note = C9Orf72 GTCN PAM targeting sequence
  source 1..20: mol_type = other RNA
aatcggtggtgctggccgca

SEQ ID NO: 16107 - RNA, 20 nt, synthetic construct
  misc_feature 1..20: note = C9Orf72 GTCN PAM targeting sequence
  source 1..20: mol_type = other RNA
actactgagagatccccaaa

SEQ ID NO: 16108 - RNA, 20 nt, synthetic construct
  misc_feature 1..20: note = C9Orf72 GTCN PAM targeting sequence
  source 1..20: mol_type = other RNA
acagaggtagcaagcagcct

SEQ ID NO: 16109 - RNA, 20 nt, synthetic construct
  misc_feature 1..20: note = C9Orf72 GTCN PAM targeting sequence
  source 1..20: mol_type = other RNA
cccatatctctggaaaataa

SEQ ID NO: 16110 - RNA, 20 nt, synthetic construct
  misc_feature 1..20: note = C9Orf72 GTCN PAM targeting sequence
  source 1..20: mol_type = other RNA
ttctttctgtcgacagcctc

SEQ ID NO: 16111 - RNA, 20 nt, synthetic construct
  misc_feature 1..20: note = C9Orf72 GTCN PAM targeting sequence
  source 1..20: mol_type = other RNA
acagcctctttctccttaag

SEQ ID NO: 16112 - RNA, 20 nt, synthetic construct
  misc_feature 1..20: note = C9Orf72 GTCN PAM targeting sequence
  source 1..20: mol_type = other RNA
acagaaagaatgacggtggg

SEQ ID NO: 16113 - RNA, 20 nt, synthetic construct
  misc_feature 1..20: note = C9Orf72 GTCN PAM targeting sequence
  source 1..20: mol_type = other RNA
gcaatttagatttagaaaac

SEQ ID NO: 16114 - RNA, 20 nt, synthetic construct
  misc_feature 1..20: note = C9Orf72 GTCN PAM targeting sequence
  source 1..20: mol_type = other RNA
catatgataaatttcagttt

SEQ ID NO: 16115 - RNA, 20 nt, synthetic construct
  misc_feature 1..20: note = C9Orf72 GTCN PAM targeting sequence
  source 1..20: mol_type = other RNA
ttaacagactccaacactgc

SEQ ID NO: 16116 - RNA, 20 nt, synthetic construct
  misc_feature 1..20: note = C9Orf72 GTCN PAM targeting sequence
  source 1..20: mol_type = other RNA
gttaatgacaatcttgaagt

SEQ ID NO: 16117 - RNA, 20 nt, synthetic construct
  misc_feature 1..20: note = C9Orf72 GTCN PAM targeting sequence
  source 1..20: mol_type = other RNA
actttagcacagagagcaaa

SEQ ID NO: 16118 - RNA, 20 nt, synthetic construct
  misc_feature 1..20: note = C9Orf72 GTCN PAM targeting sequence
  source 1..20: mol_type = other RNA
attgtttctgtttcctttgc

SEQ ID NO: 16119 - RNA, 20 nt, synthetic construct
  misc_feature 1..20: note = C9Orf72 GTCN PAM targeting sequence
  source 1..20: mol_type = other RNA
tctagatattttttcgaatt

SEQ ID NO: 16120 - RNA, 20 nt, synthetic construct
  misc_feature 1..20: note = C9Orf72 GTCN PAM targeting sequence
  source 1..20: mol_type = other RNA
cagatgtgggcttgaatccc

SEQ ID NO: 16121 - RNA, 20 nt, synthetic construct
  misc_feature 1..20: note = C9Orf72 GTCN PAM targeting sequence
  source 1..20: mol_type = other RNA
gagattttgattatcttaat

SEQ ID NO: 16122 - RNA, 20 nt, synthetic construct
  misc_feature 1..20: note = C9Orf72 GTCN PAM targeting sequence
  source 1..20: mol_type = other RNA
tacatacgcccttggaatag

SEQ ID NO: 16123 - RNA, 20 nt, synthetic construct
  misc_feature 1..20: note = C9Orf72 GTCN PAM targeting sequence
  source 1..20: mol_type = other RNA
tggacatttgtcttctatag

SEQ ID NO: 16124 - RNA, 20 nt, synthetic construct
  misc_feature 1..20: note = C9Orf72 GTCN PAM targeting sequence
  source 1..20: mol_type = other RNA
atgacatctgtacactaact

SEQ ID NO: 16125 - RNA, 20 nt, synthetic construct
  misc_feature 1..20: note = C9Orf72 GTCN PAM targeting sequence
  source 1..20: mol_type = other RNA
tctatagccaagctattttc

SEQ ID NO: 16126 - RNA, 20 nt, synthetic construct
  misc_feature 1..20: note = C9Orf72 GTCN PAM targeting sequence
  source 1..20: mol_type = other RNA
aataaagcaaaacattttaa

SEQ ID NO: 16127 - RNA, 20 nt, synthetic construct
  misc_feature 1..20: note = C9Orf72 GTCN PAM targeting sequence
  source 1..20: mol_type = other RNA
gttcttagacttgaatttga

SEQ ID NO: 16128 - RNA, 20 nt, synthetic construct
  misc_feature 1..20: note = C9Orf72 GTCN PAM targeting sequence
  source 1..20: mol_type = other RNA
aagaactgacttgaaagata

SEQ ID NO: 16129 - RNA, 20 nt, synthetic construct
  misc_feature 1..20: note = C9Orf72 GTCN PAM targeting sequence
  source 1..20: mol_type = other RNA
aattcaagtctaagaactga

SEQ ID NO: 16130 - RNA, 20 nt, synthetic construct
  misc_feature 1..20: note = C9Orf72 GTCN PAM targeting sequence
  source 1..20: mol_type = other RNA
agacaggtctgaacataaaa

SEQ ID NO: 16131 - RNA, 20 nt, synthetic construct
  misc_feature 1..20: note = C9Orf72 GTCN PAM targeting sequence
  source 1..20: mol_type = other RNA
tgacatgccctgctaccatc

SEQ ID NO: 16132 - RNA, 20 nt, synthetic construct
  misc_feature 1..20: note = C9Orf72 GTCN PAM targeting sequence
  source 1..20: mol_type = other RNA
gaacataaaaggaattatta

SEQ ID NO: 16133 - RNA, 20 nt, synthetic construct
  misc_feature 1..20: note = C9Orf72 GTCN PAM targeting sequence
  source 1..20: mol_type = other RNA
ctgggatccttggaaaatgt

SEQ ID NO: 16134 - RNA, 20 nt, synthetic construct
  misc_feature 1..20: note = C9Orf72 GTCN PAM targeting sequence
  source 1..20: mol_type = other RNA
tgccagtggcaatgtagaaa

SEQ ID NO: 16135 - RNA, 20 nt, synthetic construct
  misc_feature 1..20: note = C9Orf72 GTCN PAM targeting sequence
  source 1..20: mol_type = other RNA
tctaaataatagtttgtcag

SEQ ID NO: 16136 - RNA, 20 nt, synthetic construct
  misc_feature 1..20: note = C9Orf72 GTCN PAM targeting sequence
  source 1..20: mol_type = other RNA
gagggaaatgtattatactc

SEQ ID NO: 16137 - RNA, 20 nt, synthetic construct
  misc_feature 1..20: note = C9Orf72 GTCN PAM targeting sequence
  source 1..20: mol_type = other RNA
aaagaaacccagaaatcacc

SEQ ID NO: 16138 - RNA, 20 nt, synthetic construct
  misc_feature 1..20: note = C9Orf72 GTCN PAM targeting sequence
  source 1..20: mol_type = other RNA
ccctcacccgaaacacccag

SEQ ID NO: 16139 - RNA, 20 nt, synthetic construct
  misc_feature 1..20: note = C9Orf72 GTCN PAM targeting sequence
  source 1..20: mol_type = other RNA
catcaacagaactatagagt

SEQ ID NO: 16140 - RNA, 20 nt, synthetic construct
  misc_feature 1..20: note = C9Orf72 GTCN PAM targeting sequence
  source 1..20: mol_type = other RNA
tgttgctccctgcttcctgg

SEQ ID NO: 16141 - RNA, 20 nt, synthetic construct
  misc_feature 1..20: note = C9Orf72 GTCN PAM targeting sequence
  source 1..20: mol_type = other RNA
agaggtgaagaatgattgtg

SEQ ID NO: 16142 - RNA, 20 nt, synthetic construct
  misc_feature 1..20: note = C9Orf72 GTCN PAM targeting sequence
  source 1..20: mol_type = other RNA
taatgtgtttggcttttttt

SEQ ID NO: 16143 - RNA, 20 nt, synthetic construct
  misc_feature 1..20: note = C9Orf72 GTCN PAM targeting sequence
  source 1..20: mol_type = other RNA
cactctgttgccaggccaga

SEQ ID NO: 16144 - RNA, 20 nt, synthetic construct
  misc_feature 1..20: note = C9Orf72 GTCN PAM targeting sequence
  source 1..20: mol_type = other RNA
ggggagagtgaaaacagctt

SEQ ID NO: 16145 - RNA, 20 nt, synthetic construct
  misc_feature 1..20: note = C9Orf72 GTCN PAM targeting sequence
  source 1..20: mol_type = other RNA
gagggggtggtgtttgatga

SEQ ID NO: 16146 - RNA, 20 nt, synthetic construct
  misc_feature 1..20: note = C9Orf72 GTCN PAM targeting sequence
  source 1..20: mol_type = other RNA
cccaggctgagattctacac

SEQ ID NO: 16147 - RNA, 20 nt, synthetic construct
  misc_feature 1..20: note = C9Orf72 GTCN PAM targeting sequence
  source 1..20: mol_type = other RNA
ggcaagaaatagaccctcca

SEQ ID NO: 16148 - RNA, 20 nt, synthetic construct
  misc_feature 1..20: note = C9Orf72 GTCN PAM targeting sequence
  source 1..20: mol_type = other RNA
atttcttgccggactggtca

SEQ ID NO: 16149 - RNA, 20 nt, synthetic construct
  misc_feature 1..20: note = C9Orf72 GTCN PAM targeting sequence
  source 1..20: mol_type = other RNA
atgaaagtgaagcagcttcg

SEQ ID NO: 16150 - RNA, 20 nt, synthetic construct
  misc_feature 1..20: note = C9Orf72 GTCN PAM targeting sequence
  source 1..20: mol_type = other RNA
cagagcccaaactacctgca

SEQ ID NO: 16151 - RNA, 20 nt, synthetic construct
  misc_feature 1..20: note = C9Orf72 GTCN PAM targeting sequence
  source 1..20: mol_type = other RNA
taacccatagaataaggtaa

SEQ ID NO: 16152 - RNA, 20 nt, synthetic construct
  misc_feature 1..20: note = C9Orf72 GTCN PAM targeting sequence
  source 1..20: mol_type = other RNA
aaatacattgttgtcatttc

SEQ ID NO: 16153 - RNA, 20 nt, synthetic construct
  misc_feature 1..20: note = C9Orf72 GTCN PAM targeting sequence
  source 1..20: mol_type = other RNA
tttcaataatgttcatagca

SEQ ID NO: 16154 - RNA, 20 nt, synthetic construct
  misc_feature 1..20: note = C9Orf72 GTCN PAM targeting sequence
  source 1..20: mol_type = other RNA
catcttcaggctccagtaaa

SEQ ID NO: 16155 - RNA, 20 nt, synthetic construct
  misc_feature 1..20: note = C9Orf72 GTCN PAM targeting sequence
  source 1..20: mol_type = other RNA
ctcacttgaaatcaaaggtt

SEQ ID NO: 16156 - RNA, 20 nt, synthetic construct
  misc_feature 1..20: note = C9Orf72 GTCN PAM targeting sequence
  source 1..20: mol_type = other RNA
tcaagtgaaagtaagagttg

SEQ ID NO: 16157 - RNA, 20 nt, synthetic construct
  misc_feature 1..20: note = C9Orf72 GTCN PAM targeting sequence
  source 1..20: mol_type = other RNA
ttgtagggttactaattgac

SEQ ID NO: 16158 - RNA, 20 nt, synthetic construct
  misc_feature 1..20: note = C9Orf72 GTCN PAM targeting sequence
  source 1..20: mol_type = other RNA
attagtaaccctacaatgac

SEQ ID NO: 16159 - RNA, 20 nt, synthetic construct
  misc_feature 1..20: note = C9Orf72 GTCN PAM targeting sequence
  source 1..20: mol_type = other RNA
caaaacagttacaataataa

SEQ ID NO: 16160 - RNA, 20 nt, synthetic construct
  misc_feature 1..20: note = C9Orf72 GTCN PAM targeting sequence
  source 1..20: mol_type = other RNA
tacctccttagagcatgttt

SEQ ID NO: 16161 - RNA, 20 nt, synthetic construct
  misc_feature 1..20: note = C9Orf72 GTCN PAM targeting sequence
  source 1..20: mol_type = other RNA
aattatctgagcacctgaat

SEQ ID NO: 16162 - RNA, 20 nt, synthetic construct
  misc_feature 1..20: note = C9Orf72 GTCN PAM targeting sequence
  source 1..20: mol_type = other RNA
aacgagggcagttcccattt

SEQ ID NO: 16163 - RNA, 20 nt, synthetic construct
  misc_feature 1..20: note = C9Orf72 GTCN PAM targeting sequence
  source 1..20: mol_type = other RNA
taagtacattcacccctctg

SEQ ID NO: 16164 - RNA, 20 nt, synthetic construct
  misc_feature 1..20: note = C9Orf72 GTCN PAM targeting sequence
  source 1..20: mol_type = other RNA
ccaaagaataaaggcgtaca

SEQ ID NO: 16165 - RNA, 20 nt, synthetic construct
  misc_feature 1..20: note = C9Orf72 GTCN PAM targeting sequence
  source 1..20: mol_type = other RNA
taggatgcttactagattgg

SEQ ID NO: 16166 - RNA, 20 nt, synthetic construct
  misc_feature 1..20: note = C9Orf72 GTCN PAM targeting sequence
  source 1..20: mol_type = other RNA
atcaaatgtggcagtacctt

SEQ ID NO: 16167 - RNA, 20 nt, synthetic construct
  misc_feature 1..20: note = C9Orf72 GTCN PAM targeting sequence
  source 1..20: mol_type = other RNA
ggcttttaataacccaatac

SEQ ID NO: 16168 - RNA, 20 nt, synthetic construct
  misc_feature 1..20: note = C9Orf72 GTCN PAM targeting sequence
  source 1..20: mol_type = other RNA
tgaggtataagcaggtaatt

SEQ ID NO: 16169 - RNA, 20 nt, synthetic construct
  misc_feature 1..20: note = C9Orf72 GTCN PAM targeting sequence
  source 1..20: mol_type = other RNA
gggtagtaattttttaggtt

SEQ ID NO: 16170 - RNA, 20 nt, synthetic construct
  misc_feature 1..20: note = C9Orf72 GTCN PAM targeting sequence
  source 1..20: mol_type = other RNA
acctatgtaaaaatttttgc

SEQ ID NO: 16171 - RNA, 20 nt, synthetic construct
  misc_feature 1..20: note = C9Orf72 GTCN PAM targeting sequence
  source 1..20: mol_type = other RNA
taattggtcaccttttgcct

SEQ ID NO: 16172 - RNA, 20 nt, synthetic construct
  misc_feature 1..20: note = C9Orf72 GTCN PAM targeting sequence
  source 1..20: mol_type = other RNA
ccttttgccttataatttgg

SEQ ID NO: 16173 - RNA, 20 nt, synthetic construct
  misc_feature 1..20: note = C9Orf72 GTCN PAM targeting sequence
  source 1..20: mol_type = other RNA
tgccaaggttttctaatatt

SEQ ID NO: 16174 - RNA, 20 nt, synthetic construct
  misc_feature 1..20: note = C9Orf72 GTCN PAM targeting sequence
  source 1..20: mol_type = other RNA
aacacagattacaagccccc

SEQ ID NO: 16175 - RNA, 20 nt, synthetic construct
  misc_feature 1..20: note = C9Orf72 GTCN PAM targeting sequence
  source 1..20: mol_type = other RNA
ctagcttgatgttaaagcaa

SEQ ID NO: 16176 - RNA, 20 nt, synthetic construct
  misc_feature 1..20: note = C9Orf72 GTCN PAM targeting sequence
  source 1..20: mol_type = other RNA
gattttctcagttttcaggg

SEQ ID NO: 16177 - RNA, 20 nt, synthetic construct
  misc_feature 1..20: note = C9Orf72 GTCN PAM targeting sequence
  source 1..20: mol_type = other RNA
ctgctataattattaggcca

SEQ ID NO: 16178 - RNA, 20 nt, synthetic construct
  misc_feature 1..20: note = C9Orf72 GTCN PAM targeting sequence
  source 1..20: mol_type = other RNA
ctggcctaataattatagca

SEQ ID NO: 16179 - RNA, 20 nt, synthetic construct
  misc_feature 1..20: note = C9Orf72 GTCN PAM targeting sequence
  source 1..20: mol_type = other RNA
agggatgttcaatctataag

SEQ ID NO: 16180 - RNA, 20 nt, synthetic construct
  misc_feature 1..20: note = C9Orf72 GTCN PAM targeting sequence
  source 1..20: mol_type = other RNA
aacacccacttattccctcc

SEQ ID NO: 16181 - RNA, 20 nt, synthetic construct
  misc_feature 1..20: note = C9Orf72 GTCN PAM targeting sequence
  source 1..20: mol_type = other RNA
taaattggttaccatttttt

SEQ ID NO: 16182 - RNA, 20 nt, synthetic construct
  misc_feature 1..20: note = C9Orf72 GTCN PAM targeting sequence
  source 1..20: mol_type = other RNA
cttgcctataagcacaggaa

SEQ ID NO: 16183 - RNA, 20 nt, synthetic construct
  misc_feature 1..20: note = C9Orf72 GTCN PAM targeting sequence
  source 1..20: mol_type = other RNA
cctagtattaatgctatttc

SEQ ID NO: 16184 - RNA, 20 nt, synthetic construct
  misc_feature 1..20: note = C9Orf72 GTCN PAM targeting sequence
  source 1..20: mol_type = other RNA
ataattgatgaagccttctt

SEQ ID NO: 16185 - RNA, 20 nt, synthetic construct
  misc_feature 1..20: note = C9Orf72 GTCN PAM targeting sequence
  source 1..20: mol_type = other RNA
caagaaacagctcatttacc

SEQ ID NO: 16186 - RNA, 20 nt, synthetic construct
  misc_feature 1..20: note = C9Orf72 GTCN PAM targeting sequence
  source 1..20: mol_type = other RNA
cgatgctgtgctaactgaac

SEQ ID NO: 16187 - RNA, 20 nt, synthetic construct
  misc_feature 1..20: note = C9Orf72 GTCN PAM targeting sequence
  source 1..20: mol_type = other RNA
agctcatgccgttagcattt

SEQ ID NO: 16188 - RNA, 20 nt, synthetic construct
  misc_feature 1..20: note = C9Orf72 GTCN PAM targeting sequence
  source 1..20: mol_type = other RNA
gcaaagcatatgtaagtttg

SEQ ID NO: 16189 - RNA, 20 nt, synthetic construct
  misc_feature 1..20: note = C9Orf72 GTCN PAM targeting sequence
  source 1..20: mol_type = other RNA
tccagaaggaaattgcctga

SEQ ID NO: 16190 - RNA, 20 nt, synthetic construct
  misc_feature 1..20: note = C9Orf72 GTCN PAM targeting sequence
  source 1..20: mol_type = other RNA
cttatcagcaaacctcttct

SEQ ID NO: 16191 - RNA, 20 nt, synthetic construct
  misc_feature 1..20: note = C9Orf72 GTCN PAM targeting sequence
  source 1..20: mol_type = other RNA
ttgaaatctgaactataatg

SEQ ID NO: 16192 - RNA, 20 nt, synthetic construct
  misc_feature 1..20: note = C9Orf72 GTCN PAM targeting sequence
  source 1..20: mol_type = other RNA
catgccaaaataccctccac

SEQ ID NO: 16193 - RNA, 20 nt, synthetic construct
  misc_feature 1..20: note = C9Orf72 GTCN PAM targeting sequence
  source 1..20: mol_type = other RNA
ccatctgtcccatgccaaaa

SEQ ID NO: 16194 - RNA, 20 nt, synthetic construct
  misc_feature 1..20: note = C9Orf72 GTCN PAM targeting sequence
  source 1..20: mol_type = other RNA
atcttttcattagaaagttc

SEQ ID NO: 16195 - RNA, 20 nt, synthetic construct
  misc_feature 1..20: note = C9Orf72 GTCN PAM targeting sequence
  source 1..20: mol_type = other RNA
gggcaaatatacactagatt

SEQ ID NO: 16196 - RNA, 20 nt, synthetic construct
  misc_feature 1..20: note = C9Orf72 GTCN PAM targeting sequence
  source 1..20: mol_type = other RNA
gcaatttcattctttcaaat

SEQ ID NO: 16197 - RNA, 20 nt, synthetic construct
  misc_feature 1..20: note = C9Orf72 GTCN PAM targeting sequence
  source 1..20: mol_type = other RNA
catgtcagcaatttcattct

SEQ ID NO: 16198 - RNA, 20 nt, synthetic construct
  misc_feature 1..20: note = C9Orf72 GTCN PAM targeting sequence
  source 1..20: mol_type = other RNA
aacagtaattttggtctcat

SEQ ID NO: 16199 - RNA, 20 nt, synthetic construct
  misc_feature 1..20: note = C9Orf72 GTCN PAM targeting sequence
  source 1..20: mol_type = other RNA
cttctatatatacataaaca

SEQ ID NO: 16200 - RNA, 20 nt, synthetic construct
  misc_feature 1..20: note = C9Orf72 GTCN PAM targeting sequence
  source 1..20: mol_type = other RNA
ctcagtcacttctatatata

SEQ ID NO: 16201 - RNA, 20 nt, synthetic construct
  misc_feature 1..20: note = C9Orf72 GTCN PAM targeting sequence
  source 1..20: mol_type = other RNA
ttgggaaaaaaagtttaatg

SEQ ID NO: 16202 - RNA, 20 nt, synthetic construct
  misc_feature 1..20: note = C9Orf72 GTCN PAM targeting sequence
  source 1..20: mol_type = other RNA
caggaggaacaccaagtttt

SEQ ID NO: 16203 - RNA, 20 nt, synthetic construct
  misc_feature 1..20: note = C9Orf72 CTCN PAM targeting sequence
  source 1..20: mol_type = other RNA
tcaatacagtagagatggca

SEQ ID NO: 16204 - RNA, 20 nt, synthetic construct
  misc_feature 1..20: note = C9Orf72 CTCN PAM targeting sequence
  source 1..20: mol_type = other RNA
gggaaggagagtaccttacc

SEQ ID NO: 16205 - RNA, 20 nt, synthetic construct
  misc_feature 1..20: note = C9Orf72 CTCN PAM targeting sequence
  source 1..20: mol_type = other RNA
ttccctgagggtttttcctc

SEQ ID NO: 16206 - RNA, 20 nt, synthetic construct
  misc_feature 1..20: note = C9Orf72 CTCN PAM targeting sequence
  source 1..20: mol_type = other RNA
ccttccctgagggtttttcc

SEQ ID NO: 16207 - RNA, 20 nt, synthetic construct
  misc_feature 1..20: note = C9Orf72 CTCN PAM targeting sequence
  source 1..20: mol_type = other RNA
ggtctatctgaccgcaaagg

SEQ ID NO: 16208 - RNA, 20 nt, synthetic construct
  misc_feature 1..20: note = C9Orf72 CTCN PAM targeting sequence
  source 1..20: mol_type = other RNA
ttctactacaccatgtgatt

SEQ ID NO: 16209 - RNA, 20 nt, synthetic construct
  misc_feature 1..20: note = C9Orf72 CTCN PAM targeting sequence
  source 1..20: mol_type = other RNA
aagatagtcttatgaatatg

SEQ ID NO: 16210 - RNA, 20 nt, synthetic construct
  misc_feature 1..20: note = C9Orf72 CTCN PAM targeting sequence
  source 1..20: mol_type = other RNA
gtggcataattgttctagta

SEQ ID NO: 16211 - RNA, 20 nt, synthetic construct
  misc_feature 1..20: note = C9Orf72 CTCN PAM targeting sequence
  source 1..20: mol_type = other RNA
cagtggcataattgttctag

SEQ ID NO: 16212 - RNA, 20 nt, synthetic construct
  misc_feature 1..20: note = C9Orf72 CTCN PAM targeting sequence
  source 1..20: mol_type = other RNA
ctcagtggcataattgttct

SEQ ID NO: 16213 - RNA, 20 nt, synthetic construct
  misc_feature 1..20: note = C9Orf72 CTCN PAM targeting sequence
  source 1..20: mol_type = other RNA
gccatatttctagtgtccat

SEQ ID NO: 16214 - RNA, 20 nt, synthetic construct
  misc_feature 1..20: note = C9Orf72 CTCN PAM targeting sequence
  source 1..20: mol_type = other RNA
gctacttaaaaaaaaactct

SEQ ID NO: 16215 - RNA, 20 nt, synthetic construct
  misc_feature 1..20: note = C9Orf72 CTCN PAM targeting sequence
  source 1..20: mol_type = other RNA
gaaactgttactctgctact

SEQ ID NO: 16216 - RNA, 20 nt, synthetic construct
  misc_feature 1..20: note = C9Orf72 CTCN PAM targeting sequence
  source 1..20: mol_type = other RNA
ctgaaactgttactctgcta

SEQ ID NO: 16217 - RNA, 20 nt, synthetic construct
  misc_feature 1..20: note = C9Orf72 CTCN PAM targeting sequence
  source 1..20: mol_type = other RNA
gtgaccttgaataagtaccc

SEQ ID NO: 16218 - RNA, 20 nt, synthetic construct
  misc_feature 1..20: note = C9Orf72 CTCN PAM targeting sequence
  source 1..20: mol_type = other RNA
taaattcataaagggaatgt

SEQ ID NO: 16219 - RNA, 20 nt, synthetic construct
  misc_feature 1..20: note = C9Orf72 CTCN PAM targeting sequence
  source 1..20: mol_type = other RNA
aatgtctttcctgatgtttc

SEQ ID NO: 16220 - RNA, 20 nt, synthetic construct
  misc_feature 1..20: note = C9Orf72 CTCN PAM targeting sequence
  source 1..20: mol_type = other RNA
gcaagactctgcaagctgta

SEQ ID NO: 16221 - RNA, 20 nt, synthetic construct
  misc_feature 1..20: note = C9Orf72 CTCN PAM targeting sequence
  source 1..20: mol_type = other RNA
gcaagctgtattctagcact

SEQ ID NO: 16222 - RNA, 20 nt, synthetic construct
  misc_feature 1..20: note = C9Orf72 CTCN PAM targeting sequence
  source 1..20: mol_type = other RNA
acccagtgggcaagtgctag

SEQ ID NO: 16223 - RNA, 20 nt, synthetic construct
  misc_feature 1..20: note = C9Orf72 CTCN PAM targeting sequence
  source 1..20: mol_type = other RNA
ttggctccacccagtgggca

SEQ ID NO: 16224 - RNA, 20 nt, synthetic construct
  misc_feature 1..20: note = C9Orf72 CTCN PAM targeting sequence
  source 1..20: mol_type = other RNA
tttaaataaacaaatggcaa

SEQ ID NO: 16225 - RNA, 20 nt, synthetic construct
  misc_feature 1..20: note = C9Orf72 CTCN PAM targeting sequence
  source 1..20: mol_type = other RNA
gatgaagaaagcgatggaac

SEQ ID NO: 16226 - RNA, 20 nt, synthetic construct
  misc_feature 1..20: note = C9Orf72 CTCN PAM targeting sequence
  source 1..20: mol_type = other RNA
cgcaggctagcagggccaaa

SEQ ID NO: 16227 - RNA, 20 nt, synthetic construct
  misc_feature 1..20: note = C9Orf72 CTCN PAM targeting sequence
  source 1..20: mol_type = other RNA
ctgagagtgtggccaaaata

SEQ ID NO: 16228 - RNA, 20 nt, synthetic construct
  misc_feature 1..20: note = C9Orf72 CTCN PAM targeting sequence
  source 1..20: mol_type = other RNA
gagagtgtggccaaaatagc

SEQ ID NO: 16229 - RNA, 20 nt, synthetic construct
  misc_feature 1..20: note = C9Orf72 CTCN PAM targeting sequence
  source 1..20: mol_type = other RNA
gagaggaaggaatgtgtttg

SEQ ID NO: 16230 - RNA, 20 nt, synthetic construct
  misc_feature 1..20: note = C9Orf72 CTCN PAM targeting sequence
  source 1..20: mol_type = other RNA
cagagaggaaggaatgtgtt

SEQ ID NO: 16231 - RNA, 20 nt, synthetic construct
  misc_feature 1..20: note = C9Orf72 CTCN PAM targeting sequence
  source 1..20: mol_type = other RNA
ttacaatgaatttgccattg

SEQ ID NO: 16232 - RNA, 20 nt, synthetic construct
  misc_feature 1..20: note = C9Orf72 CTCN PAM targeting sequence
  source 1..20: mol_type = other RNA
agcaatggcaaattcattgt

SEQ ID NO: 16233 - RNA, 20 nt, synthetic construct
  misc_feature 1..20: note = C9Orf72 CTCN PAM targeting sequence
  source 1..20: mol_type = other RNA
aaaacgtgtattaaaaggct

SEQ ID NO: 16234 - RNA, 20 nt, synthetic construct
  misc_feature 1..20: note = C9Orf72 CTCN PAM targeting sequence
  source 1..20: mol_type = other RNA
gcggaagccttttaatacac

SEQ ID NO: 16235 - RNA, 20 nt, synthetic construct
  misc_feature 1..20: note = C9Orf72 CTCN PAM targeting sequence
  source 1..20: mol_type = other RNA
tcacctcagcggaagccttt

SEQ ID NO: 16236 - RNA, 20 nt, synthetic construct
  misc_feature 1..20: note = C9Orf72 CTCN PAM targeting sequence
  source 1..20: mol_type = other RNA
gaagcttctcatcacctcag

SEQ ID NO: 16237 - RNA, 20 nt, synthetic construct
  misc_feature 1..20: note = C9Orf72 CTCN PAM targeting sequence
  source 1..20: mol_type = other RNA
gtttcatttgttttaaaata

SEQ ID NO: 16238 - RNA, 20 nt, synthetic construct
  misc_feature 1..20: note = C9Orf72 CTCN PAM targeting sequence
  source 1..20: mol_type = other RNA
actgtcaacaaaacaaattc

SEQ ID NO: 16239 - RNA, 20 nt, synthetic construct
  misc_feature 1..20: note = C9Orf72 CTCN PAM targeting sequence
  source 1..20: mol_type = other RNA
gaagcctgtcaaagaaagag

SEQ ID NO: 16240 - RNA, 20 nt, synthetic construct
  misc_feature 1..20: note = C9Orf72 CTCN PAM targeting sequence
  source 1..20: mol_type = other RNA
ttctttgacaggcttcagag

SEQ ID NO: 16241 - RNA, 20 nt, synthetic construct
  misc_feature 1..20: note = C9Orf72 CTCN PAM targeting sequence
  source 1..20: mol_type = other RNA
cctcctgctgaattccctcc

SEQ ID NO: 16242 - RNA, 20 nt, synthetic construct
  misc_feature 1..20: note = C9Orf72 CTCN PAM targeting sequence
  source 1..20: mol_type = other RNA
tgctgaattccctcccactc

SEQ ID NO: 16243 - RNA, 20 nt, synthetic construct
  misc_feature 1..20: note = C9Orf72 CTCN PAM targeting sequence
  source 1..20: mol_type = other RNA
cactcaccacaccagccagg

SEQ ID NO: 16244 - RNA, 20 nt, synthetic construct
  misc_feature 1..20: note = C9Orf72 CTCN PAM targeting sequence
  source 1..20: mol_type = other RNA
ccacaccagccaggcaaact

SEQ ID NO: 16245 - RNA, 20 nt, synthetic construct
  misc_feature 1..20: note = C9Orf72 CTCN PAM targeting sequence
  source 1..20: mol_type = other RNA
aggtctccaactggccagtt

SEQ ID NO: 16246 - RNA, 20 nt, synthetic construct
  misc_feature 1..20: note = C9Orf72 CTCN PAM targeting sequence
  source 1..20: mol_type = other RNA
aactggccagtttctagtgg

SEQ ID NO: 16247 - RNA, 20 nt, synthetic construct
  misc_feature 1..20: note = C9Orf72 CTCN PAM targeting sequence
  source 1..20: mol_type = other RNA
gcctggcaaattttgacatc

SEQ ID NO: 16248 - RNA, 20 nt, synthetic construct
  misc_feature 1..20: note = C9Orf72 CTCN PAM targeting sequence
  source 1..20: mol_type = other RNA
tttcttgggtatctccatca

SEQ ID NO: 16249 - RNA, 20 nt, synthetic construct
  misc_feature 1..20: note = C9Orf72 CTCN PAM targeting sequence
  source 1..20: mol_type = other RNA
atcactttgcacacatttgc

SEQ ID NO: 16250 - RNA, 20 nt, synthetic construct
  misc_feature 1..20: note = C9Orf72 CTCN PAM targeting sequence
  source 1..20: mol_type = other RNA
ctaaccattttaaagccgtt

SEQ ID NO: 16251 - RNA, 20 nt, synthetic construct
  misc_feature 1..20: note = C9Orf72 CTCN PAM targeting sequence
  source 1..20: mol_type = other RNA
ccctagtagccaccattaaa

SEQ ID NO: 16252 - RNA, 20 nt, synthetic construct
  misc_feature 1..20: note = C9Orf72 CTCN PAM targeting sequence
  source 1..20: mol_type = other RNA
tccccctagtagccaccatt

SEQ ID NO: 16253 - RNA, 20 nt, synthetic construct
  misc_feature 1..20: note = C9Orf72 CTCN PAM targeting sequence
  source 1..20: mol_type = other RNA
ctaatacagcacgcccgcac

SEQ ID NO: 16254 - RNA, 20 nt, synthetic construct
  misc_feature 1..20: note = C9Orf72 CTCN PAM targeting sequence
  source 1..20: mol_type = other RNA
aatacagcacgcccgcacac

SEQ ID NO: 16255 - RNA, 20 nt, synthetic construct
  misc_feature 1..20: note = C9Orf72 CTCN PAM targeting sequence
  source 1..20: mol_type = other RNA
tgcgtacacacccctgaagt

SEQ ID NO: 16256 - RNA, 20 nt, synthetic construct
  misc_feature 1..20: note = C9Orf72 CTCN PAM targeting sequence
  source 1..20: mol_type = other RNA
tactttccgttctgtttcca

SEQ ID NO: 16257 - RNA, 20 nt, synthetic construct
  misc_feature 1..20: note = C9Orf72 CTCN PAM targeting sequence
  source 1..20: mol_type = other RNA
cctactttccgttctgtttc

SEQ ID NO: 16258 - RNA, 20 nt, synthetic construct
  misc_feature 1..20: note = C9Orf72 CTCN PAM targeting sequence
  source 1..20: mol_type = other RNA
cccagcaccttttccaatca

SEQ ID NO: 16259 - RNA, 20 nt, synthetic construct
  misc_feature 1..20: note = C9Orf72 CTCN PAM targeting sequence
  source 1..20: mol_type = other RNA
tgtcttttcagcaatatcac

SEQ ID NO: 16260 - RNA, 20 nt, synthetic construct
  misc_feature 1..20: note = C9Orf72 CTCN PAM targeting sequence
  source 1..20: mol_type = other RNA
cagctttcctcgtgtctttt

SEQ ID NO: 16261 - RNA, 20 nt, synthetic construct
  misc_feature 1..20: note = C9Orf72 CTCN PAM targeting sequence
  source 1..20: mol_type = other RNA
ctgcccattaatcagcagtg

SEQ ID NO: 16262 - RNA, 20 nt, synthetic construct
  misc_feature 1..20: note = C9Orf72 CTCN PAM targeting sequence
  source 1..20: mol_type = other RNA
gtcccagctaccggccccgt

SEQ ID NO: 16263 - RNA, 20 nt, synthetic construct
  misc_feature 1..20: note = C9Orf72 CTCN PAM targeting sequence
  source 1..20: mol_type = other RNA
ggcacggggccggtagctgg

SEQ ID NO: 16264 - RNA, 20 nt, synthetic construct
  misc_feature 1..20: note = C9Orf72 CTCN PAM targeting sequence
  source 1..20: mol_type = other RNA
actcagatgggacatacctg

SEQ ID NO: 16265 - RNA, 20 nt, synthetic construct
  misc_feature 1..20: note = C9Orf72 CTCN PAM targeting sequence
  source 1..20: mol_type = other RNA
gatgggacatacctggaaaa

SEQ ID NO: 16266 - RNA, 20 nt, synthetic construct
  misc_feature 1..20: note = C9Orf72 CTCN PAM targeting sequence
  source 1..20: mol_type = other RNA
tcccggttgtagggttttgg

SEQ ID NO: 16267 - RNA, 20 nt, synthetic construct
  misc_feature 1..20: note = C9Orf72 CTCN PAM targeting sequence
  source 1..20: mol_type = other RNA
aggggtagaggccaggtcag

SEQ ID NO: 16268 - RNA, 20 nt, synthetic construct
  misc_feature 1..20: note = C9Orf72 CTCN PAM targeting sequence
  source 1..20: mol_type = other RNA
acccctagagggccttagcc

SEQ ID NO: 16269 - RNA, 20 nt, synthetic construct
  misc_feature 1..20: note = C9Orf72 CTCN PAM targeting sequence
  source 1..20: mol_type = other RNA
ttctgacctggcctctaccc

SEQ ID NO: 16270 - RNA, 20 nt, synthetic construct
  misc_feature 1..20: note = C9Orf72 CTCN PAM targeting sequence
  source 1..20: mol_type = other RNA
caaattccacttcttagaga

SEQ ID NO: 16271 - RNA, 20 nt, synthetic construct
  misc_feature 1..20: note = C9Orf72 CTCN PAM targeting sequence
  source 1..20: mol_type = other RNA
aagaagtggaatttgtgaga

SEQ ID NO: 16272 - RNA, 20 nt, synthetic construct
  misc_feature 1..20: note = C9Orf72 CTCN PAM targeting sequence
  source 1..20: mol_type = other RNA
agattgtacccatatttcat

SEQ ID NO: 16273 - RNA, 20 nt, synthetic construct
  misc_feature 1..20: note = C9Orf72 CTCN PAM targeting sequence
  source 1..20: mol_type = other RNA
atccacagccatcacagaag

SEQ ID NO: 16274 - RNA, 20 nt, synthetic construct
  misc_feature 1..20: note = C9Orf72 CTCN PAM targeting sequence
  source 1..20: mol_type = other RNA
ctcatggctttcccctgccc

SEQ ID NO: 16275 - RNA, 20 nt, synthetic construct
  misc_feature 1..20: note = C9Orf72 CTCN PAM targeting sequence
  source 1..20: mol_type = other RNA
catggctttcccctgccctt

SEQ ID NO: 16276 - RNA, 20 nt, synthetic construct
  misc_feature 1..20: note = C9Orf72 CTCN PAM targeting sequence
  source 1..20: mol_type = other RNA
tggctttcccctgcccttcc

SEQ ID NO: 16277 - RNA, 20 nt, synthetic construct
  misc_feature 1..20: note = C9Orf72 CTCN PAM targeting sequence
  source 1..20: mol_type = other RNA
attccaaacagctgtgctgg

SEQ ID NO: 16278 - RNA, 20 nt, synthetic construct
  misc_feature 1..20: note = C9Orf72 CTCN PAM targeting sequence
  source 1..20: mol_type = other RNA
ccagcacagctgtttggaat

SEQ ID NO: 16279 - RNA, 20 nt, synthetic construct
  misc_feature 1..20: note = C9Orf72 CTCN PAM targeting sequence
  source 1..20: mol_type = other RNA
caacagggtcctcagctcct

SEQ ID NO: 16280 - RNA, 20 nt, synthetic construct
  misc_feature 1..20: note = C9Orf72 CTCN PAM targeting sequence
  source 1..20: mol_type = other RNA
gctcctgccagcactcactt

SEQ ID NO: 16281 - RNA, 20 nt, synthetic construct
  misc_feature 1..20: note = C9Orf72 CTCN PAM targeting sequence
  source 1..20: mol_type = other RNA
tgccagcactcacttccctc

SEQ ID NO: 16282 - RNA, 20 nt, synthetic construct
  misc_feature 1..20: note = C9Orf72 CTCN PAM targeting sequence
  source 1..20: mol_type = other RNA
cttccctcaggccacatttc

SEQ ID NO: 16283 - RNA, 20 nt, synthetic construct
  misc_feature 1..20: note = C9Orf72 CTCN PAM targeting sequence
  source 1..20: mol_type = other RNA
ggccacatttccacactcaa

SEQ ID NO: 16284 - RNA, 20 nt, synthetic construct
  misc_feature 1..20: note = C9Orf72 CTCN PAM targeting sequence
  source 1..20: mol_type = other RNA
atgttacaccaacattttgc

SEQ ID NO: 16285 - RNA, 20 nt, synthetic construct
  misc_feature 1..20: note = C9Orf72 CTCN PAM targeting sequence
  source 1..20: mol_type = other RNA
agatctaacccacttatagc

SEQ ID NO: 16286 - RNA, 20 nt, synthetic construct
  misc_feature 1..20: note = C9Orf72 CTCN PAM targeting sequence
  source 1..20: mol_type = other RNA
ggactgggtagttttcttgg

SEQ ID NO: 16287 - RNA, 20 nt, synthetic construct
  misc_feature 1..20: note = C9Orf72 CTCN PAM targeting sequence
  source 1..20: mol_type = other RNA
aagaaaactacccagtccag

SEQ ID NO: 16288 - RNA, 20 nt, synthetic construct
  misc_feature 1..20: note = C9Orf72 CTCN PAM targeting sequence
  source 1..20: mol_type = other RNA
tccaagaaaactacccagtc

SEQ ID NO: 16289 - RNA, 20 nt, synthetic construct
  misc_feature 1..20: note = C9Orf72 CTCN PAM targeting sequence
  source 1..20: mol_type = other RNA
tcactcctccaagaaaacta

SEQ ID NO: 16290 - RNA, 20 nt, synthetic construct
  misc_feature 1..20: note = C9Orf72 CTCN PAM targeting sequence
  source 1..20: mol_type = other RNA
tcctcatcactcctccaaga

SEQ ID NO: 16291 - RNA, 20 nt, synthetic construct
  misc_feature 1..20: note = C9Orf72 CTCN PAM targeting sequence
  source 1..20: mol_type = other RNA
ttttctttggtctcatcctc

SEQ ID NO: 16292 - RNA, 20 nt, synthetic construct
  misc_feature 1..20: note = C9Orf72 CTCN PAM targeting sequence
  source 1..20: mol_type = other RNA
gctataccgtgtgggcccat

SEQ ID NO: 16293 - RNA, 20 nt, synthetic construct
  misc_feature 1..20: note = C9Orf72 CTCN PAM targeting sequence
  source 1..20: mol_type = other RNA
tggactgtagacagggacag

SEQ ID NO: 16294 - RNA, 20 nt, synthetic construct
  misc_feature 1..20: note = C9Orf72 CTCN PAM targeting sequence
  source 1..20: mol_type = other RNA
ctgattgctgtccctgtcta

SEQ ID NO: 16295 - RNA, 20 nt, synthetic construct
  misc_feature 1..20: note = C9Orf72 CTCN PAM targeting sequence
  source 1..20: mol_type = other RNA
tagcgccacgacactagaag

SEQ ID NO: 16296 - RNA, 20 nt, synthetic construct
  misc_feature 1..20: note = C9Orf72 CTCN PAM targeting sequence
  source 1..20: mol_type = other RNA
catagcgccacgacactaga

SEQ ID NO: 16297 - RNA, 20 nt, synthetic construct
  misc_feature 1..20: note = C9Orf72 CTCN PAM targeting sequence
  source 1..20: mol_type = other RNA
tttgattccacagcccctga

SEQ ID NO: 16298 - RNA, 20 nt, synthetic construct
  misc_feature 1..20: note = C9Orf72 CTCN PAM targeting sequence
  source 1..20: mol_type = other RNA
ctgaatcgtccagtttgaag

SEQ ID NO: 16299 - RNA, 20 nt, synthetic construct
  misc_feature 1..20: note = C9Orf72 CTCN PAM targeting sequence
  source 1..20: mol_type = other RNA
gaatcgtccagtttgaaggg

SEQ ID NO: 16300 - RNA, 20 nt, synthetic construct
  misc_feature 1..20: note = C9Orf72 CTCN PAM targeting sequence
  source 1..20: mol_type = other RNA
gaattccctgtggcaccatg

SEQ ID NO: 16301 - RNA, 20 nt, synthetic construct
  misc_feature 1..20: note = C9Orf72 CTCN PAM targeting sequence
  source 1..20: mol_type = other RNA
aggaccacaggcagcatggt

SEQ ID NO: 16302 - RNA, 20 nt, synthetic construct
  misc_feature 1..20: note = C9Orf72 CTCN PAM targeting sequence
  source 1..20: mol_type = other RNA
ctaatgcctgctggtgtcct

SEQ ID NO: 16303 - RNA, 20 nt, synthetic construct
  misc_feature 1..20: note = C9Orf72 CTCN PAM targeting sequence
  source 1..20: mol_type = other RNA
aatgcctgctggtgtcctca

SEQ ID NO: 16304 - RNA, 20 nt, synthetic construct
  misc_feature 1..20: note = C9Orf72 CTCN PAM targeting sequence
  source 1..20: mol_type = other RNA
acagcactggctggaaaggt

SEQ ID NO: 16305 - RNA, 20 nt, synthetic construct
  misc_feature 1..20: note = C9Orf72 CTCN PAM targeting sequence
  source 1..20: mol_type = other RNA
ctggatcttcagcagtacct

SEQ ID NO: 16306 - RNA, 20 nt, synthetic construct
  misc_feature 1..20: note = C9Orf72 CTCN PAM targeting sequence
  source 1..20: mol_type = other RNA
atttcctactagatcaagtc

SEQ ID NO: 16307 - RNA, 20 nt, synthetic construct
  misc_feature 1..20: note = C9Orf72 CTCN PAM targeting sequence
  source 1..20: mol_type = other RNA
acttcccatgacttgcaagg

SEQ ID NO: 16308 - RNA, 20 nt, synthetic construct
  misc_feature 1..20: note = C9Orf72 CTCN PAM targeting sequence
  source 1..20: mol_type = other RNA
atgcagaaggaacaagtgtg

SEQ ID NO: 16309 - RNA, 20 nt, synthetic construct
  misc_feature 1..20: note = C9Orf72 CTCN PAM targeting sequence
  source 1..20: mol_type = other RNA
ccatgcagaaggaacaagtg

SEQ ID NO: 16310 - RNA, 20 nt, synthetic construct
  misc_feature 1..20: note = C9Orf72 CTCN PAM targeting sequence
  source 1..20: mol_type = other RNA
agagcactccagttcctctt

SEQ ID NO: 16311 - RNA, 20 nt, synthetic construct
  misc_feature 1..20: note = C9Orf72 CTCN PAM targeting sequence
  source 1..20: mol_type = other RNA
ggaggaaacaaggaaatagg

SEQ ID NO: 16312 - RNA, 20 nt, synthetic construct
  misc_feature 1..20: note = C9Orf72 CTCN PAM targeting sequence
  source 1..20: mol_type = other RNA
agttcctctttcccagccct

SEQ ID NO: 16313 - RNA, 20 nt, synthetic construct
  misc_feature 1..20: note = C9Orf72 CTCN PAM targeting sequence
  source 1..20: mol_type = other RNA
ttcccagccctgcttgggtg

SEQ ID NO: 16314 - RNA, 20 nt, synthetic construct
  misc_feature 1..20: note = C9Orf72 CTCN PAM targeting sequence
  source 1..20: mol_type = other RNA
cacctacgtggcttgtaagc

SEQ ID NO: 16315 - RNA, 20 nt, synthetic construct
  misc_feature 1..20: note = C9Orf72 CTCN PAM targeting sequence
  source 1..20: mol_type = other RNA
gtctcccacctacgtggctt

SEQ ID NO: 16316 - RNA, 20 nt, synthetic construct
  misc_feature 1..20: note = C9Orf72 CTCN PAM targeting sequence
  source 1..20: mol_type = other RNA
ctttctgggaattgctctgt

SEQ ID NO: 16317 - RNA, 20 nt, synthetic construct
  misc_feature 1..20: note = C9Orf72 CTCN PAM targeting sequence
  source 1..20: mol_type = other RNA
gggtgtgatgaaagagagat

SEQ ID NO: 16318 - RNA, 20 nt, synthetic construct
  misc_feature 1..20: note = C9Orf72 CTCN PAM targeting sequence
  source 1..20: mol_type = other RNA
ttcatcacacccagagttct

SEQ ID NO: 16319 - RNA, 20 nt, synthetic construct
  misc_feature 1..20: note = C9Orf72 CTCN PAM targeting sequence
  source 1..20: mol_type = other RNA
ctttcatcacacccagagtt

SEQ ID NO: 16320 - RNA, 20 nt, synthetic construct
  misc_feature 1..20: note = C9Orf72 CTCN PAM targeting sequence
  source 1..20: mol_type = other RNA
atctctctttcatcacaccc

SEQ ID NO: 16321 - RNA, 20 nt, synthetic construct
  misc_feature 1..20: note = C9Orf72 CTCN PAM targeting sequence
  source 1..20: mol_type = other RNA
ggggcgctgctgggatcctc

SEQ ID NO: 16322 - RNA, 20 nt, synthetic construct
  misc_feature 1..20: note = C9Orf72 CTCN PAM targeting sequence
  source 1..20: mol_type = other RNA
ccttcagacgggggtgcagt

SEQ ID NO: 16323 - RNA, 20 nt, synthetic construct
  misc_feature 1..20: note = C9Orf72 CTCN PAM targeting sequence
  source 1..20: mol_type = other RNA
ttcagacgggggtgcagttc

SEQ ID NO: 16324 - RNA, 20 nt, synthetic construct
  misc_feature 1..20: note = C9Orf72 CTCN PAM targeting sequence
  source 1..20: mol_type = other RNA
ccttcaaagcagaactgcac

SEQ ID NO: 16325 - RNA, 20 nt, synthetic construct
  misc_feature 1..20: note = C9Orf72 CTCN PAM targeting sequence
  source 1..20: mol_type = other RNA
ttttccggggatttccctgc

SEQ ID NO: 16326 - RNA, 20 nt, synthetic construct
  misc_feature 1..20: note = C9Orf72 CTCN PAM targeting sequence
  source 1..20: mol_type = other RNA
ctttttccggggatttccct

SEQ ID NO: 16327 - RNA, 20 nt, synthetic construct
  misc_feature 1..20: note = C9Orf72 CTCN PAM targeting sequence
  source 1..20: mol_type = other RNA
tctctttttccggggatttc

SEQ ID NO: 16328 - RNA, 20 nt, synthetic construct
  misc_feature 1..20: note = C9Orf72 CTCN PAM targeting sequence
  source 1..20: mol_type = other RNA
cctctctttttccggggatt

SEQ ID NO: 16329 - RNA, 20 nt, synthetic construct
  misc_feature 1..20: note = C9Orf72 CTCN PAM targeting sequence
  source 1..20: mol_type = other RNA
acagccaagtccatgtggca

SEQ ID NO: 16330 - RNA, 20 nt, synthetic construct
  misc_feature 1..20: note = C9Orf72 CTCN PAM targeting sequence
  source 1..20: mol_type = other RNA
tgcctggcctcgggcacagg

SEQ ID NO: 16331 - RNA, 20 nt, synthetic construct
  misc_feature 1..20: note = C9Orf72 CTCN PAM targeting sequence
  source 1..20: mol_type = other RNA
ggcacagggaggccactgtg

SEQ ID NO: 16332 - RNA, 20 nt, synthetic construct
  misc_feature 1..20: note = C9Orf72 CTCN PAM targeting sequence
  source 1..20: mol_type = other RNA
ctgtgcccgaggccaggcaa

SEQ ID NO: 16333 - RNA, 20 nt, synthetic construct
  misc_feature 1..20: note = C9Orf72 CTCN PAM targeting sequence
  source 1..20: mol_type = other RNA
tttggacagctgtggtcccg

SEQ ID NO: 16334 - RNA, 20 nt, synthetic construct
  misc_feature 1..20: note = C9Orf72 CTCN PAM targeting sequence
  source 1..20: mol_type = other RNA
ccacttcctgtggtgtttct

SEQ ID NO: 16335 - RNA, 20 nt, synthetic construct
  misc_feature 1..20: note = C9Orf72 CTCN PAM targeting sequence
  source 1..20: mol_type = other RNA
tttagctttctagaatccaa

SEQ ID NO: 16336 - RNA, 20 nt, synthetic construct
  misc_feature 1..20: note = C9Orf72 CTCN PAM targeting sequence
  source 1..20: mol_type = other RNA
gatacatacagctatttgga

SEQ ID NO: 16337 - RNA, 20 nt, synthetic construct
  misc_feature 1..20: note = C9Orf72 CTCN PAM targeting sequence
  source 1..20: mol_type = other RNA
aggggaaggacccctcccac

SEQ ID NO: 16338 - RNA, 20 nt, synthetic construct
  misc_feature 1..20: note = C9Orf72 CTCN PAM targeting sequence
  source 1..20: mol_type = other RNA
caccccgactccggtggaca

SEQ ID NO: 16339 - RNA, 20 nt, synthetic construct
  misc_feature 1..20: note = C9Orf72 CTCN PAM targeting sequence
  source 1..20: mol_type = other RNA
ggtggacaggcaggtaactc

SEQ ID NO: 16340 - RNA, 20 nt, synthetic construct
  misc_feature 1..20: note = C9Orf72 CTCN PAM targeting sequence
  source 1..20: mol_type = other RNA
acaagtggggcctcctgggg

SEQ ID NO: 16341 - RNA, 20 nt, synthetic construct
  misc_feature 1..20: note = C9Orf72 CTCN PAM targeting sequence
  source 1..20: mol_type = other RNA
tggggcatgactttctaagg

SEQ ID NO: 16342 - RNA, 20 nt, synthetic construct
  misc_feature 1..20: note = C9Orf72 CTCN PAM targeting sequence
  source 1..20: mol_type = other RNA
ttagaaagtcatgccccagg

SEQ ID NO: 16343 - RNA, 20 nt, synthetic construct
  misc_feature 1..20: note = C9Orf72 CTCN PAM targeting sequence
  source 1..20: mol_type = other RNA
gttgcatccttggtgcagag

SEQ ID NO: 16344 - RNA, 20 nt, synthetic construct
  misc_feature 1..20: note = C9Orf72 CTCN PAM targeting sequence
  source 1..20: mol_type = other RNA
gcaccaaggatgcaactgag

SEQ ID NO: 16345 - RNA, 20 nt, synthetic construct
  misc_feature 1..20: note = C9Orf72 CTCN PAM targeting sequence
  source 1..20: mol_type = other RNA
ctctgcaccaaggatgcaac

SEQ ID NO: 16346 - RNA, 20 nt, synthetic construct
  misc_feature 1..20: note = C9Orf72 CTCN PAM targeting sequence
  source 1..20: mol_type = other RNA
ccctcactctgcaccaagga

SEQ ID NO: 16347 - RNA, 20 nt, synthetic construct
  misc_feature 1..20: note = C9Orf72 CTCN PAM targeting sequence
  source 1..20: mol_type = other RNA
cacaaacagctgggaatggt

SEQ ID NO: 16348 - RNA, 20 nt, synthetic construct
  misc_feature 1..20: note = C9Orf72 CTCN PAM targeting sequence
  source 1..20: mol_type = other RNA
acagcctcacacaaacagct

SEQ ID NO: 16349 - RNA, 20 nt, synthetic construct
  misc_feature 1..20: note = C9Orf72 CTCN PAM targeting sequence
  source 1..20: mol_type = other RNA
ctccacagcctcacacaaac

SEQ ID NO: 16350 - RNA, 20 nt, synthetic construct
  misc_feature 1..20: note = C9Orf72 CTCN PAM targeting sequence
  source 1..20: mol_type = other RNA
gggagagtctccctgccatg

SEQ ID NO: 16351 - RNA, 20 nt, synthetic construct
  misc_feature 1..20: note = C9Orf72 CTCN PAM targeting sequence
  source 1..20: mol_type = other RNA
ccgagggttcccagggatcc

SEQ ID NO: 16352 - RNA, 20 nt, synthetic construct
  misc_feature 1..20: note = C9Orf72 CTCN PAM targeting sequence
  source 1..20: mol_type = other RNA
ccccgagggttcccagggat

SEQ ID NO: 16353 - RNA, 20 nt, synthetic construct
  misc_feature 1..20: note = C9Orf72 CTCN PAM targeting sequence
  source 1..20: mol_type = other RNA
ctgccatgcactccccctag

SEQ ID NO: 16354 - RNA, 20 nt, synthetic construct
  misc_feature 1..20: note = C9Orf72 CTCN PAM targeting sequence
  source 1..20: mol_type = other RNA
ccctaggctcaggggacttc

SEQ ID NO: 16355 - RNA, 20 nt, synthetic construct
  misc_feature 1..20: note = C9Orf72 CTCN PAM targeting sequence
  source 1..20: mol_type = other RNA
ggggacttcgttcttgccct

SEQ ID NO: 16356 - RNA, 20 nt, synthetic construct
  misc_feature 1..20: note = C9Orf72 CTCN PAM targeting sequence
  source 1..20: mol_type = other RNA
aggccttttctgcagtggtc

SEQ ID NO: 16357 - RNA, 20 nt, synthetic construct
  misc_feature 1..20: note = C9Orf72 CTCN PAM targeting sequence
  source 1..20: mol_type = other RNA
accagcttgaccactgcaga

SEQ ID NO: 16358 - RNA, 20 nt, synthetic construct
  misc_feature 1..20: note = C9Orf72 CTCN PAM targeting sequence
  source 1..20: mol_type = other RNA
gaaaacaagcttccaggcag

SEQ ID NO: 16359 - RNA, 20 nt, synthetic construct
  misc_feature 1..20: note = C9Orf72 CTCN PAM targeting sequence
  source 1..20: mol_type = other RNA
tctgaaaacaagcttccagg

SEQ ID NO: 16360 - RNA, 20 nt, synthetic construct
  misc_feature 1..20: note = C9Orf72 CTCN PAM targeting sequence
  source 1..20: mol_type = other RNA
tggtccctttaccctcctct

SEQ ID NO: 16361 - RNA, 20 nt, synthetic construct
  misc_feature 1..20: note = C9Orf72 CTCN PAM targeting sequence
  source 1..20: mol_type = other RNA
cctaaggattccaccattga

SEQ ID NO: 16362 - RNA, 20 nt, synthetic construct
  misc_feature 1..20: note = C9Orf72 CTCN PAM targeting sequence
  source 1..20: mol_type = other RNA
tgcctgaacctcgcctaagg

SEQ ID NO: 16363 - RNA, 20 nt, synthetic construct
  misc_feature 1..20: note = C9Orf72 CTCN PAM targeting sequence
  source 1..20: mol_type = other RNA
gaaacagacacaacaacgtt

SEQ ID NO: 16364 - RNA, 20 nt, synthetic construct
  misc_feature 1..20: note = C9Orf72 CTCN PAM targeting sequence
  source 1..20: mol_type = other RNA
cagatgctctgaaacagaca

SEQ ID NO: 16365 - RNA, 20 nt, synthetic construct
  misc_feature 1..20: note = C9Orf72 CTCN PAM targeting sequence
  source 1..20: mol_type = other RNA
cccagatgctctgaaacaga

SEQ ID NO: 16366 - RNA, 20 nt, synthetic construct
  misc_feature 1..20: note = C9Orf72 CTCN PAM targeting sequence
  source 1..20: mol_type = other RNA
ctcccagatgctctgaaaca

SEQ ID NO: 16367 - RNA, 20 nt, synthetic construct
  misc_feature 1..20: note = C9Orf72 CTCN PAM targeting sequence
  source 1..20: mol_type = other RNA
agttatttataccaataaag

SEQ ID NO: 16368 - RNA, 20 nt, synthetic construct
  misc_feature 1..20: note = C9Orf72 CTCN PAM targeting sequence
  source 1..20: mol_type = other RNA
tgtgacctggcacggcttca

SEQ ID NO: 16369 - RNA, 20 nt, synthetic construct
  misc_feature 1..20: note = C9Orf72 CTCN PAM targeting sequence
  source 1..20: mol_type = other RNA
gactcttgtgacctggcacg

SEQ ID NO: 16370 - RNA, 20 nt, synthetic construct
  misc_feature 1..20: note = C9Orf72 CTCN PAM targeting sequence
  source 1..20: mol_type = other RNA
tatcactgccccatcttgtt

SEQ ID NO: 16371 - RNA, 20 nt, synthetic construct
  misc_feature 1..20: note = C9Orf72 CTCN PAM targeting sequence
  source 1..20: mol_type = other RNA
cttatcactgccccatcttg

SEQ ID NO: 16372 - RNA, 20 nt, synthetic construct
  misc_feature 1..20: note = C9Orf72 CTCN PAM targeting sequence
  source 1..20: mol_type = other RNA
attcggaacacaagacactt

SEQ ID NO: 16373 - RNA, 20 nt, synthetic construct
  misc_feature 1..20: note = C9Orf72 CTCN PAM targeting sequence
  source 1..20: mol_type = other RNA
atgctggacatcatttcatt

SEQ ID NO: 16374 - RNA, 20 nt, synthetic construct
  misc_feature 1..20: note = C9Orf72 CTCN PAM targeting sequence
  source 1..20: mol_type = other RNA
gtaaaataagaatgatacca

SEQ ID NO: 16375 - RNA, 20 nt, synthetic construct
  misc_feature 1..20: note = C9Orf72 CTCN PAM targeting sequence
  source 1..20: mol_type = other RNA
attacccctctgtaaaataa

SEQ ID NO: 16376 - RNA, 20 nt, synthetic construct
  misc_feature 1..20: note = C9Orf72 CTCN PAM targeting sequence
  source 1..20: mol_type = other RNA
gccatggccacatcactaat

SEQ ID NO: 16377 - RNA, 20 nt, synthetic construct
  misc_feature 1..20: note = C9Orf72 CTCN PAM targeting sequence
  source 1..20: mol_type = other RNA
taaccagtctactatatcct

SEQ ID NO: 16378 - RNA, 20 nt, synthetic construct
  misc_feature 1..20: note = C9Orf72 CTCN PAM targeting sequence
  source 1..20: mol_type = other RNA
ggatatagtagactggttag

SEQ ID NO: 16379 - RNA, 20 nt, synthetic construct
  misc_feature 1..20: note = C9Orf72 CTCN PAM targeting sequence
  source 1..20: mol_type = other RNA
actgaaacagcacatgtaga

SEQ ID NO: 16380 - RNA, 20 nt, synthetic construct
  misc_feature 1..20: note = C9Orf72 CTCN PAM targeting sequence
  source 1..20: mol_type = other RNA
gaatcagcggctgtaccaca

SEQ ID NO: 16381 - RNA, 20 nt, synthetic construct
  misc_feature 1..20: note = C9Orf72 CTCN PAM targeting sequence
  source 1..20: mol_type = other RNA
cgtggcccatgctggtgtgg

SEQ ID NO: 16382 - RNA, 20 nt, synthetic construct
  misc_feature 1..20: note = C9Orf72 CTCN PAM targeting sequence
  source 1..20: mol_type = other RNA
gctggcaggaccgttcccag

SEQ ID NO: 16383 - RNA, 20 nt, synthetic construct
  misc_feature 1..20: note = C9Orf72 CTCN PAM targeting sequence
  source 1..20: mol_type = other RNA
tgggaacggtcctgccagcc

SEQ ID NO: 16384 - RNA, 20 nt, synthetic construct
  misc_feature 1..20: note = C9Orf72 CTCN PAM targeting sequence
  source 1..20: mol_type = other RNA
aagtatatacaggatccaac

SEQ ID NO: 16385 - RNA, 20 nt, synthetic construct
  misc_feature 1..20: note = C9Orf72 CTCN PAM targeting sequence
  source 1..20: mol_type = other RNA
cttttaggaatgtgggtggc

SEQ ID NO: 16386 - RNA, 20 nt, synthetic construct
  misc_feature 1..20: note = C9Orf72 CTCN PAM targeting sequence
  source 1..20: mol_type = other RNA
tttaggaatgtgggtggcaa

SEQ ID NO: 16387 - RNA, 20 nt, synthetic construct
  misc_feature 1..20: note = C9Orf72 CTCN PAM targeting sequence
  source 1..20: mol_type = other RNA
gtgtcagtaatgtgggctgt

SEQ ID NO: 16388 - RNA, 20 nt, synthetic construct
  misc_feature 1..20: note = C9Orf72 CTCN PAM targeting sequence
  source 1..20: mol_type = other RNA
atcgtggaaacgccctccgt

SEQ ID NO: 16389 - RNA, 20 nt, synthetic construct
  misc_feature 1..20: note = C9Orf72 CTCN PAM targeting sequence
  source 1..20: mol_type = other RNA
caagtgcacatatacatatg

SEQ ID NO: 16390 - RNA, 20 nt, synthetic construct
  misc_feature 1..20: note = C9Orf72 CTCN PAM targeting sequence
  source 1..20: mol_type = other RNA
ccacccacggagaatattta

SEQ ID NO: 16391 - RNA, 20 nt, synthetic construct
  misc_feature 1..20: note = C9Orf72 CTCN PAM targeting sequence
  source 1..20: mol_type = other RNA
gtgggtggcgagtgtgtgtg

SEQ ID NO: 16392 - RNA, 20 nt, synthetic construct
  misc_feature 1..20: note = C9Orf72 CTCN PAM targeting sequence
  source 1..20: mol_type = other RNA
tctttttccaaaccctgcaa

SEQ ID NO: 16393 - RNA, 20 nt, synthetic construct
  misc_feature 1..20: note = C9Orf72 CTCN PAM targeting sequence
  source 1..20: mol_type = other RNA
tgatttacattgtttcttat

SEQ ID NO: 16394 - RNA, 20 nt, synthetic construct
  misc_feature 1..20: note = C9Orf72 CTCN PAM targeting sequence
  source 1..20: mol_type = other RNA
gtctttataagaaacaatgt

SEQ ID NO: 16395 - RNA, 20 nt, synthetic construct
  misc_feature 1..20: note = C9Orf72 CTCN PAM targeting sequence
  source 1..20: mol_type = other RNA
catttaaccacaggagatgg

SEQ ID NO: 16396 - RNA, 20 nt, synthetic construct
  misc_feature 1..20: note = C9Orf72 CTCN PAM targeting sequence
  source 1..20: mol_type = other RNA
tttaaccacaggagatgggt

SEQ ID NO: 16397 - RNA, 20 nt, synthetic construct
  misc_feature 1..20: note = C9Orf72 CTCN PAM targeting sequence
  source 1..20: mol_type = other RNA
tgtggttaaatgagagaact

SEQ ID NO: 16398 - RNA, 20 nt, synthetic construct
  misc_feature 1..20: note = C9Orf72 CTCN PAM targeting sequence
  source 1..20: mol_type = other RNA
tagtgcatcgtgaaagcaag

SEQ ID NO: 16399 - RNA, 20 nt, synthetic construct
  misc_feature 1..20: note = C9Orf72 CTCN PAM targeting sequence
  source 1..20: mol_type = other RNA
tgctttcacgatgcactatg

SEQ ID NO: 16400 - RNA, 20 nt, synthetic construct
  misc_feature 1..20: note = C9Orf72 CTCN PAM targeting sequence
  source 1..20: mol_type = other RNA
gcagatcccctccctagagc

SEQ ID NO: 16401 - RNA, 20 nt, synthetic construct
  misc_feature 1..20: note = C9Orf72 CTCN PAM targeting sequence
  source 1..20: mol_type = other RNA
ctagagccccgcagcccacc

SEQ ID NO: 16402 - RNA, 20 nt, synthetic construct
  misc_feature 1..20: note = C9Orf72 CTCN PAM targeting sequence
  source 1..20: mol_type = other RNA
agggaggggatctgcagaga

SEQ ID NO: 16403 - RNA, 20 nt, synthetic construct
  misc_feature 1..20: note = C9Orf72 CTCN PAM targeting sequence
  source 1..20: mol_type = other RNA
ttctgcaactctgtgctttt

SEQ ID NO: 16404 - RNA, 20 nt, synthetic construct
  misc_feature 1..20: note = C9Orf72 CTCN PAM targeting sequence
  source 1..20: mol_type = other RNA
gtgctttttttttagcaccc

SEQ ID NO: 16405 - RNA, 20 nt, synthetic construct
  misc_feature 1..20: note = C9Orf72 CTCN PAM targeting sequence
  source 1..20: mol_type = other RNA
gtggatccacctaccatgtc

SEQ ID NO: 16406 - RNA, 20 nt, synthetic construct
  misc_feature 1..20: note = C9Orf72 CTCN PAM targeting sequence
  source 1..20: mol_type = other RNA
gactgatgctacctgtgatc

SEQ ID NO: 16407 - RNA, 20 nt, synthetic construct
  misc_feature 1..20: note = C9Orf72 CTCN PAM targeting sequence
  source 1..20: mol_type = other RNA
tttgatcacaggtagcatca

SEQ ID NO: 16408 - RNA, 20 nt, synthetic construct
  misc_feature 1..20: note = C9Orf72 CTCN PAM targeting sequence
  source 1..20: mol_type = other RNA
aagcgacactgagatctctg

SEQ ID NO: 16409 - RNA, 20 nt, synthetic construct
  misc_feature 1..20: note = C9Orf72 CTCN PAM targeting sequence
  source 1..20: mol_type = other RNA
gtgtcgctttgagcagaaat

SEQ ID NO: 16410 - RNA, 20 nt, synthetic construct
  misc_feature 1..20: note = C9Orf72 CTCN PAM targeting sequence
  source 1..20: mol_type = other RNA
gacatttggctgctgctccc

SEQ ID NO: 16411 - RNA, 20 nt, synthetic construct
  misc_feature 1..20: note = C9Orf72 CTCN PAM targeting sequence
  source 1..20: mol_type = other RNA
ccgctcctttcctcctctgt

SEQ ID NO: 16412 - RNA, 20 nt, synthetic construct
  misc_feature 1..20: note = C9Orf72 CTCN PAM targeting sequence
  source 1..20: mol_type = other RNA
tttcctcctctgttacccaa

SEQ ID NO: 16413 - RNA, 20 nt, synthetic construct
  misc_feature 1..20: note = C9Orf72 CTCN PAM targeting sequence
  source 1..20: mol_type = other RNA
tctgttacccaacttctcca

SEQ ID NO: 16414 - RNA, 20 nt, synthetic construct
  misc_feature 1..20: note = C9Orf72 CTCN PAM targeting sequence
  source 1..20: mol_type = other RNA
gttacccaacttctccagag

SEQ ID NO: 16415 - RNA, 20 nt, synthetic construct
  misc_feature 1..20: note = C9Orf72 CTCN PAM targeting sequence
  source 1..20: mol_type = other RNA
agagcccccatggaggtctg

SEQ ID NO: 16416 - RNA, 20 nt, synthetic construct
  misc_feature 1..20: note = C9Orf72 CTCN PAM targeting sequence
  source 1..20: mol_type = other RNA
ggagaagttgggtaacagag

SEQ ID NO: 16417 - RNA, 20 nt, synthetic construct
  misc_feature 1..20: note = C9Orf72 CTCN PAM targeting sequence
  source 1..20: mol_type = other RNA
atgggggctctggagaagtt

SEQ ID NO: 16418 - RNA, 20 nt, synthetic construct
  misc_feature 1..20: note = C9Orf72 CTCN PAM targeting sequence
  source 1..20: mol_type = other RNA
tgccaactgtgcagacctcc

SEQ ID NO: 16419 - RNA, 20 nt, synthetic construct
  misc_feature 1..20: note = C9Orf72 CTCN PAM targeting sequence
  source 1..20: mol_type = other RNA
ctccttctcatacccagcat

SEQ ID NO: 16420 - RNA, 20 nt, synthetic construct
  misc_feature 1..20: note = C9Orf72 CTCN PAM targeting sequence
  source 1..20: mol_type = other RNA
ttctcatacccagcatttgt

SEQ ID NO: 16421 - RNA, 20 nt, synthetic construct
  misc_feature 1..20: note = C9Orf72 CTCN PAM targeting sequence
  source 1..20: mol_type = other RNA
tacccagcatttgtcagcgc

SEQ ID NO: 16422 - RNA, 20 nt, synthetic construct
  misc_feature 1..20: note = C9Orf72 CTCN PAM targeting sequence
  source 1..20: mol_type = other RNA
tcccagaacaaggggcagca

SEQ ID NO: 16423 - RNA, 20 nt, synthetic construct
  misc_feature 1..20: note = C9Orf72 CTCN PAM targeting sequence
  source 1..20: mol_type = other RNA
gtcaccctttgctcatccca

SEQ ID NO: 16424 - RNA, 20 nt, synthetic construct
  misc_feature 1..20: note = C9Orf72 CTCN PAM targeting sequence
  source 1..20: mol_type = other RNA
aagcgggtgggtgcactcag

SEQ ID NO: 16425 - RNA, 20 nt, synthetic construct
  misc_feature 1..20: note = C9Orf72 CTCN PAM targeting sequence
  source 1..20: mol_type = other RNA
cgcatccagcctttaaggaa

SEQ ID NO: 16426 - RNA, 20 nt, synthetic construct
  misc_feature 1..20: note = C9Orf72 CTCN PAM targeting sequence
  source 1..20: mol_type = other RNA
catttgcttctgtcatgtgg

SEQ ID NO: 16427 - RNA, 20 nt, synthetic construct
  misc_feature 1..20: note = C9Orf72 CTCN PAM targeting sequence
  source 1..20: mol_type = other RNA
tgatagaaaggccacatgac

SEQ ID NO: 16428 - RNA, 20 nt, synthetic construct
  misc_feature 1..20: note = C9Orf72 CTCN PAM targeting sequence
  source 1..20: mol_type = other RNA
cactcctgatagaaaggcca

SEQ ID NO: 16429 - RNA, 20 nt, synthetic construct
  misc_feature 1..20: note = C9Orf72 CTCN PAM targeting sequence
  source 1..20: mol_type = other RNA
gcttcaccggccagtgcctt

SEQ ID NO: 16430 - RNA, 20 nt, synthetic construct
  misc_feature 1..20: note = C9Orf72 CTCN PAM targeting sequence
  source 1..20: mol_type = other RNA
ctgcttcaccggccagtgcc

SEQ ID NO: 16431 - RNA, 20 nt, synthetic construct
  misc_feature 1..20: note = C9Orf72 CTCN PAM targeting sequence
  source 1..20: mol_type = other RNA
aggttaggttgcaggcacca

SEQ ID NO: 16432 - RNA, 20 nt, synthetic construct
  misc_feature 1..20: note = C9Orf72 CTCN PAM targeting sequence
  source 1..20: mol_type = other RNA
ggtgcctgcaacctaacctg

SEQ ID NO: 16433 - RNA, 20 nt, synthetic construct
  misc_feature 1..20: note = C9Orf72 CTCN PAM targeting sequence
  source 1..20: mol_type = other RNA
taatgacatgcaagaaacgc

SEQ ID NO: 16434 - RNA, 20 nt, synthetic construct
  misc_feature 1..20: note = C9Orf72 CTCN PAM targeting sequence
  source 1..20: mol_type = other RNA
aaaaggacaaaccgtttgtt

SEQ ID NO: 16435 - RNA, 20 nt, synthetic construct
  misc_feature 1..20: note = C9Orf72 CTCN PAM targeting sequence
  source 1..20: mol_type = other RNA
ctccaaaaggacaaaccgtt

SEQ ID NO: 16436 - RNA, 20 nt, synthetic construct
  misc_feature 1..20: note = C9Orf72 CTCN PAM targeting sequence
  source 1..20: mol_type = other RNA
gaaagttcagaatactccct

SEQ ID NO: 16437 - RNA, 20 nt, synthetic construct
  misc_feature 1..20: note = C9Orf72 CTCN PAM targeting sequence
  source 1..20: mol_type = other RNA
cctgggaaaacaaaggattc

SEQ ID NO: 16438 - RNA, 20 nt, synthetic construct
  misc_feature 1..20: note = C9Orf72 CTCN PAM targeting sequence
  source 1..20: mol_type = other RNA
gtcctgtggtgaattcagct

SEQ ID NO: 16439 - RNA, 20 nt, synthetic construct
  misc_feature 1..20: note = C9Orf72 CTCN PAM targeting sequence
  source 1..20: mol_type = other RNA
attgtgtgtctgatgaaaac

SEQ ID NO: 16440 - RNA, 20 nt, synthetic construct
  misc_feature 1..20: note = C9Orf72 CTCN PAM targeting sequence
  source 1..20: mol_type = other RNA
gtgagcctgtaatttaggaa

SEQ ID NO: 16441 - RNA, 20 nt, synthetic construct
  misc_feature 1..20: note = C9Orf72 CTCN PAM targeting sequence
  source 1..20: mol_type = other RNA
ctgaggaagcacattcccca

SEQ ID NO: 16442 - RNA, 20 nt, synthetic construct
  misc_feature 1..20: note = C9Orf72 CTCN PAM targeting sequence
  source 1..20: mol_type = other RNA
ctcctttggtaggaacaaag

SEQ ID NO: 16443 - RNA, 20 nt, synthetic construct
  misc_feature 1..20: note = C9Orf72 CTCN PAM targeting sequence
  source 1..20: mol_type = other RNA
tttggtaggaacaaagtgtt

SEQ ID NO: 16444 - RNA, 20 nt, synthetic construct
  misc_feature 1..20: note = C9Orf72 CTCN PAM targeting sequence
  source 1..20: mol_type = other RNA
atcaaaataacactttgttc

SEQ ID NO: 16445 - RNA, 20 nt, synthetic construct
  misc_feature 1..20: note = C9Orf72 CTCN PAM targeting sequence
  source 1..20: mol_type = other RNA
ttgtattaaaaggaaaattt

SEQ ID NO: 16446 - RNA, 20 nt, synthetic construct
  misc_feature 1..20: note = C9Orf72 CTCN PAM targeting sequence
  source 1..20: mol_type = other RNA
tgctagaagtttgactacca

SEQ ID NO: 16447 - RNA, 20 nt, synthetic construct
  misc_feature 1..20: note = C9Orf72 CTCN PAM targeting sequence
  source 1..20: mol_type = other RNA
agctctcacagagagaaatt

SEQ ID NO: 16448 - RNA, 20 nt, synthetic construct
  misc_feature 1..20: note = C9Orf72 CTCN PAM targeting sequence
  source 1..20: mol_type = other RNA
cacagagagaaatttggtct

SEQ ID NO: 16449 - RNA, 20 nt, synthetic construct
  misc_feature 1..20: note = C9Orf72 CTCN PAM targeting sequence
  source 1..20: mol_type = other RNA
cagagagaaatttggtctcg

SEQ ID NO: 16450 - RNA, 20 nt, synthetic construct
  misc_feature 1..20: note = C9Orf72 CTCN PAM targeting sequence
  source 1..20: mol_type = other RNA
gtgagagcttgagaacatgt

SEQ ID NO: 16451 - RNA, 20 nt, synthetic construct
  misc_feature 1..20: note = C9Orf72 CTCN PAM targeting sequence
  source 1..20: mol_type = other RNA
ctgtgagagcttgagaacat

SEQ ID NO: 16452 - RNA, 20 nt, synthetic construct
  misc_feature 1..20: note = C9Orf72 CTCN PAM targeting sequence
  source 1..20: mol_type = other RNA
tgagagcctcaggagctggt

SEQ ID NO: 16453 - RNA, 20 nt, synthetic construct
  misc_feature 1..20: note = C9Orf72 CTCN PAM targeting sequence
  source 1..20: mol_type = other RNA
cgagaccaaatttctctctg

SEQ ID NO: 16454 - RNA, 20 nt, synthetic construct
  misc_feature 1..20: note = C9Orf72 CTCN PAM targeting sequence
  source 1..20: mol_type = other RNA
cacgagaccaaatttctctc

SEQ ID NO: 16455 - RNA, 20 nt, synthetic construct
  misc_feature 1..20: note = C9Orf72 CTCN PAM targeting sequence
  source 1..20: mol_type = other RNA
ggagctggtcaccactttgt

SEQ ID NO: 16456 - RNA, 20 nt, synthetic construct
  misc_feature 1..20: note = C9Orf72 CTCN PAM targeting sequence
  source 1..20: mol_type = other RNA
tgaggctctcacgagaccaa

SEQ ID NO: 16457 - RNA, 20 nt, synthetic construct
  misc_feature 1..20: note = C9Orf72 CTCN PAM targeting sequence
  source 1..20: mol_type = other RNA
gtcactgactctcaggtcta

SEQ ID NO: 16458 - RNA, 20 nt, synthetic construct
  misc_feature 1..20: note = C9Orf72 CTCN PAM targeting sequence
  source 1..20: mol_type = other RNA
caggtctatggggtggccat

SEQ ID NO: 16459 - RNA, 20 nt, synthetic construct
  misc_feature 1..20: note = C9Orf72 CTCN PAM targeting sequence
  source 1..20: mol_type = other RNA
ggtctatggggtggccatta

SEQ ID NO: 16460 - RNA, 20 nt, synthetic construct
  misc_feature 1..20: note = C9Orf72 CTCN PAM targeting sequence
  source 1..20: mol_type = other RNA
aggggaagcataatggccac

SEQ ID NO: 16461 - RNA, 20 nt, synthetic construct
  misc_feature 1..20: note = C9Orf72 CTCN PAM targeting sequence
  source 1..20: mol_type = other RNA
ctaggggaagcataatggcc

SEQ ID NO: 16462 - RNA, 20 nt, synthetic construct
  misc_feature 1..20: note = C9Orf72 CTCN PAM targeting sequence
  source 1..20: mol_type = other RNA
gccaagtatcaaccatgtaa

SEQ ID NO: 16463 - RNA, 20 nt, synthetic construct
  misc_feature 1..20: note = C9Orf72 CTCN PAM targeting sequence
  source 1..20: mol_type = other RNA
ctctgccaagtatcaaccat

SEQ ID NO: 16464 - RNA, 20 nt, synthetic construct
  misc_feature 1..20: note = C9Orf72 CTCN PAM targeting sequence
  source 1..20: mol_type = other RNA
gaatcctatctttttttcta

SEQ ID NO: 16465 - RNA, 20 nt, synthetic construct
  misc_feature 1..20: note = C9Orf72 CTCN PAM targeting sequence
  source 1..20: mol_type = other RNA
tagcttatgggccatacaaa

SEQ ID NO: 16466 - RNA, 20 nt, synthetic construct
  misc_feature 1..20: note = C9Orf72 CTCN PAM targeting sequence
  source 1..20: mol_type = other RNA
aataaaacttgtttatggac

SEQ ID NO: 16467 - RNA, 20 nt, synthetic construct
  misc_feature 1..20: note = C9Orf72 CTCN PAM targeting sequence
  source 1..20: mol_type = other RNA
gccatggaagtgcagaagca

SEQ ID NO: 16468 - RNA, 20 nt, synthetic construct
  misc_feature 1..20: note = C9Orf72 CTCN PAM targeting sequence
  source 1..20: mol_type = other RNA
gctctgccatggaagtgcag

SEQ ID NO: 16469 - RNA, 20 nt, synthetic construct
  misc_feature 1..20: note = C9Orf72 CTCN PAM targeting sequence
  source 1..20: mol_type = other RNA
gtcccagtcgctcagctctg

SEQ ID NO: 16470 - RNA, 20 nt, synthetic construct
  misc_feature 1..20: note = C9Orf72 CTCN PAM targeting sequence
  source 1..20: mol_type = other RNA
cgtcgcaccatgccaatacc

SEQ ID NO: 16471 - RNA, 20 nt, synthetic construct
  misc_feature 1..20: note = C9Orf72 CTCN PAM targeting sequence
  source 1..20: mol_type = other RNA
ctggtcatggtattggcatg

SEQ ID NO: 16472 - RNA, 20 nt, synthetic construct
  misc_feature 1..20: note = C9Orf72 CTCN PAM targeting sequence
  source 1..20: mol_type = other RNA
ctagttttgacccacatggt

SEQ ID NO: 16473 - RNA, 20 nt, synthetic construct
  misc_feature 1..20: note = C9Orf72 CTCN PAM targeting sequence
  source 1..20: mol_type = other RNA
agttttgacccacatggtta

SEQ ID NO: 16474 - RNA, 20 nt, synthetic construct
  misc_feature 1..20: note = C9Orf72 CTCN PAM targeting sequence
  source 1..20: mol_type = other RNA
caagacagaagactggacta

SEQ ID NO: 16475 - RNA, 20 nt, synthetic construct
  misc_feature 1..20: note = C9Orf72 CTCN PAM targeting sequence
  source 1..20: mol_type = other RNA
tgttttagaagcgtttttct

SEQ ID NO: 16476 - RNA, 20 nt, synthetic construct
  misc_feature 1..20: note = C9Orf72 CTCN PAM targeting sequence
  source 1..20: mol_type = other RNA
actcttgttttagaagcgtt

SEQ ID NO: 16477 - RNA, 20 nt, synthetic construct
  misc_feature 1..20: note = C9Orf72 CTCN PAM targeting sequence
  source 1..20: mol_type = other RNA
acatgcctatagtcccttag

SEQ ID NO: 16478 - RNA, 20 nt, synthetic construct
  misc_feature 1..20: note = C9Orf72 CTCN PAM targeting sequence
  source 1..20: mol_type = other RNA
ccctccccctccccctccgt

SEQ ID NO: 16479 - RNA, 20 nt, synthetic construct
  misc_feature 1..20: note = C9Orf72 CTCN PAM targeting sequence
  source 1..20: mol_type = other RNA
ctccccctccccctccgtct

SEQ ID NO: 16480 - RNA, 20 nt, synthetic construct
  misc_feature 1..20: note = C9Orf72 CTCN PAM targeting sequence
  source 1..20: mol_type = other RNA
ccctccccctccgtctccct

SEQ ID NO: 16481 - RNA, 20 nt, synthetic construct
  misc_feature 1..20: note = C9Orf72 CTCN PAM targeting sequence
  source 1..20: mol_type = other RNA
ccctccgtctccctttccct

SEQ ID NO: 16482 - RNA, 20 nt, synthetic construct
  misc_feature 1..20: note = C9Orf72 CTCN PAM targeting sequence
  source 1..20: mol_type = other RNA
gtctccctttccctcgtctc

SEQ ID NO: 16483 - RNA, 20 nt, synthetic construct
  misc_feature 1..20: note = C9Orf72 CTCN PAM targeting sequence
  source 1..20: mol_type = other RNA
ctttccctcgtctccctctc

SEQ ID NO: 16484 - RNA, 20 nt, synthetic construct
  misc_feature 1..20: note = C9Orf72 CTCN PAM targeting sequence
  source 1..20: mol_type = other RNA
tctccctctccctctccccg

SEQ ID NO: 16485 - RNA, 20 nt, synthetic construct
  misc_feature 1..20: note = C9Orf72 CTCN PAM targeting sequence
  source 1..20: mol_type = other RNA
ctctccctctccccggtctc

SEQ ID NO: 16486 - RNA, 20 nt, synthetic construct
  misc_feature 1..20: note = C9Orf72 CTCN PAM targeting sequence
  source 1..20: mol_type = other RNA
ccctctccccggtctccctc

SEQ ID NO: 16487 - RNA, 20 nt, synthetic construct
  misc_feature 1..20: note = C9Orf72 CTCN PAM targeting sequence
  source 1..20: mol_type = other RNA
ctctccccggtctccctctg

SEQ ID NO: 16488 - RNA, 20 nt, synthetic construct
  misc_feature 1..20: note = C9Orf72 CTCN PAM targeting sequence
  source 1..20: mol_type = other RNA
ccccggtctccctctgatgc

SEQ ID NO: 16489 - RNA, 20 nt, synthetic construct
  misc_feature 1..20: note = C9Orf72 CTCN PAM targeting sequence
  source 1..20: mol_type = other RNA
ccggtctccctctgatgcca

SEQ ID NO: 16490 - RNA, 20 nt, synthetic construct
  misc_feature 1..20: note = C9Orf72 CTCN PAM targeting sequence
  source 1..20: mol_type = other RNA
ctctgatgccaccaaagttg

SEQ ID NO: 16491 - RNA, 20 nt, synthetic construct
  misc_feature 1..20: note = C9Orf72 CTCN PAM targeting sequence
  source 1..20: mol_type = other RNA
gatgccaccaaagttgtgaa

SEQ ID NO: 16492 - RNA, 20 nt, synthetic construct
  misc_feature 1..20: note = C9Orf72 CTCN PAM targeting sequence
  source 1..20: mol_type = other RNA
ccgcaacctccctgcctgat

SEQ ID NO: 16493 - RNA, 20 nt, synthetic construct
  misc_feature 1..20: note = C9Orf72 CTCN PAM targeting sequence
  source 1..20: mol_type = other RNA
ctgcctgattctcctgcctc

SEQ ID NO: 16494 - RNA, 20 nt, synthetic construct
  misc_feature 1..20: note = C9Orf72 CTCN PAM targeting sequence
  source 1..20: mol_type = other RNA
tgcctcagcctgcagagtgc

SEQ ID NO: 16495 - RNA, 20 nt, synthetic construct
  misc_feature 1..20: note = C9Orf72 CTCN PAM targeting sequence
  source 1..20: mol_type = other RNA
gtgtgagcctgcttctatgt

SEQ ID NO: 16496 - RNA, 20 nt, synthetic construct
  misc_feature 1..20: note = C9Orf72 CTCN PAM targeting sequence
  source 1..20: mol_type = other RNA
gcacccagccatgttcctgg

SEQ ID NO: 16497 - RNA, 20 nt, synthetic construct
  misc_feature 1..20: note = C9Orf72 CTCN PAM targeting sequence
  source 1..20: mol_type = other RNA
cctgtgctatggcacccatt

SEQ ID NO: 16498 - RNA, 20 nt, synthetic construct
  misc_feature 1..20: note = C9Orf72 CTCN PAM targeting sequence
  source 1..20: mol_type = other RNA
cagaatccatcctacacgca

SEQ ID NO: 16499 - RNA, 20 nt, synthetic construct
  misc_feature 1..20: note = C9Orf72 CTCN PAM targeting sequence
  source 1..20: mol_type = other RNA
accctataccttctcccaga

SEQ ID NO: 16500 - RNA, 20 nt, synthetic construct
  misc_feature 1..20: note = C9Orf72 CTCN PAM targeting sequence
  source 1..20: mol_type = other RNA
gggtaagtcagtaagcttat

SEQ ID NO: 16501 - RNA, 20 nt, synthetic construct
  misc_feature 1..20: note = C9Orf72 CTCN PAM targeting sequence
  source 1..20: mol_type = other RNA
attcatggcaaatgccctag

SEQ ID NO: 16502 - RNA, 20 nt, synthetic construct
  misc_feature 1..20: note = C9Orf72 CTCN PAM targeting sequence
  source 1..20: mol_type = other RNA
taggctataaacctgtacag

SEQ ID NO: 16503 - RNA, 20 nt, synthetic construct
  misc_feature 1..20: note = C9Orf72 CTCN PAM targeting sequence
  source 1..20: mol_type = other RNA
atgatcttcacattatggca

SEQ ID NO: 16504 - RNA, 20 nt, synthetic construct
  misc_feature 1..20: note = C9Orf72 CTCN PAM targeting sequence
  source 1..20: mol_type = other RNA
gaatgtattcccatcattat

SEQ ID NO: 16505 - RNA, 20 nt, synthetic construct
  misc_feature 1..20: note = C9Orf72 CTCN PAM targeting sequence
  source 1..20: mol_type = other RNA
agaaacctggtctttctaca

SEQ ID NO: 16506 - RNA, 20 nt, synthetic construct
  misc_feature 1..20: note = C9Orf72 CTCN PAM targeting sequence
  source 1..20: mol_type = other RNA
accactccagaaacctggtc

SEQ ID NO: 16507 - RNA, 20 nt, synthetic construct
  misc_feature 1..20: note = C9Orf72 CTCN PAM targeting sequence
  source 1..20: mol_type = other RNA
accactccaccactccagaa

SEQ ID NO: 16508 - RNA, 20 nt, synthetic construct
  misc_feature 1..20: note = C9Orf72 CTCN PAM targeting sequence
  source 1..20: mol_type = other RNA
cttccctttcaattcacagt

SEQ ID NO: 16509 - RNA, 20 nt, synthetic construct
  misc_feature 1..20: note = C9Orf72 CTCN PAM targeting sequence
  source 1..20: mol_type = other RNA
ccttccttgaaagaagccag

SEQ ID NO: 16510 - RNA, 20 nt, synthetic construct
  misc_feature 1..20: note = C9Orf72 CTCN PAM targeting sequence
  source 1..20: mol_type = other RNA
gtgtggtttcttcttcctcc

SEQ ID NO: 16511 - RNA, 20 nt, synthetic construct
  misc_feature 1..20: note = C9Orf72 CTCN PAM targeting sequence
  source 1..20: mol_type = other RNA
tattacctcagtgtggtttc

SEQ ID NO: 16512 - RNA, 20 nt, synthetic construct
  misc_feature 1..20: note = C9Orf72 CTCN PAM targeting sequence
  source 1..20: mol_type = other RNA
gtgaaaactcctattacctc

SEQ ID NO: 16513 - RNA, 20 nt, synthetic construct
  misc_feature 1..20: note = C9Orf72 CTCN PAM targeting sequence
  source 1..20: mol_type = other RNA
ttgcttaagaaatctgactc

SEQ ID NO: 16514 - RNA, 20 nt, synthetic construct
  misc_feature 1..20: note = C9Orf72 CTCN PAM targeting sequence
  source 1..20: mol_type = other RNA
aaagtgctcattgcttaaga

SEQ ID NO: 16515 - RNA, 20 nt, synthetic construct
  misc_feature 1..20: note = C9Orf72 CTCN PAM targeting sequence
  source 1..20: mol_type = other RNA
ccaaagtgctcattgcttaa

SEQ ID NO: 16516 - RNA, 20 nt, synthetic construct
  misc_feature 1..20: note = C9Orf72 CTCN PAM targeting sequence
  source 1..20: mol_type = other RNA
ttcttttcccattttctaca

SEQ ID NO: 16517 - RNA, 20 nt, synthetic construct
  misc_feature 1..20: note = C9Orf72 CTCN PAM targeting sequence
  source 1..20: mol_type = other RNA
gcatttctctttcttttccc

SEQ ID NO: 16518 - RNA, 20 nt, synthetic construct
  misc_feature 1..20: note = C9Orf72 CTCN PAM targeting sequence
  source 1..20: mol_type = other RNA
gtggtggtttaaaaatattt

SEQ ID NO: 16519 - RNA, 20 nt, synthetic construct
  misc_feature 1..20: note = C9Orf72 CTCN PAM targeting sequence
  source 1..20: mol_type = other RNA
cttcaagaaatatggccagg

SEQ ID NO: 16520 - RNA, 20 nt, synthetic construct
  misc_feature 1..20: note = C9Orf72 CTCN PAM targeting sequence
  source 1..20: mol_type = other RNA
tcaagaaatatggccaggcc

SEQ ID NO: 16521 - RNA, 20 nt, synthetic construct
  misc_feature 1..20: note = C9Orf72 CTCN PAM targeting sequence
  source 1..20: mol_type = other RNA
cacctgtaatcccagcactt

SEQ ID NO: 16522 - RNA, 20 nt, synthetic construct
  misc_feature 1..20: note = C9Orf72 CTCN PAM targeting sequence
  source 1..20: mol_type = other RNA
caaagtgctgggattacagg

SEQ ID NO: 16523 - RNA, 20 nt, synthetic construct
  misc_feature 1..20: note = C9Orf72 CTCN PAM targeting sequence
  source 1..20: mol_type = other RNA
gcctcccaaagtgctgggat

SEQ ID NO: 16524 - RNA, 20 nt, synthetic construct
  misc_feature 1..20: note = C9Orf72 CTCN PAM targeting sequence
  source 1..20: mol_type = other RNA
tgcctcagcctcccaaagtg

SEQ ID NO: 16525 - RNA, 20 nt, synthetic construct
  misc_feature 1..20: note = C9Orf72 CTCN PAM targeting sequence
  source 1..20: mol_type = other RNA
agtgatcctcctgcctcagc

SEQ ID NO: 16526 - RNA, 20 nt, synthetic construct
  misc_feature 1..20: note = C9Orf72 CTCN PAM targeting sequence
  source 1..20: mol_type = other RNA
tgaactcaagtgatcctcct

SEQ ID NO: 16527 - RNA, 20 nt, synthetic construct
  misc_feature 1..20: note = C9Orf72 CTCN PAM targeting sequence
  source 1..20: mol_type = other RNA
actaaaaataaaaaaattat

SEQ ID NO: 16528 - RNA, 20 nt, synthetic construct
  misc_feature 1..20: note = C9Orf72 CTCN PAM targeting sequence
  source 1..20: mol_type = other RNA
cattccagctgctctggagg

SEQ ID NO: 16529 - RNA, 20 nt, synthetic construct
  misc_feature 1..20: note = C9Orf72 CTCN PAM targeting sequence
  source 1..20: mol_type = other RNA
ttccagctgctctggaggct

SEQ ID NO: 16530 - RNA, 20 nt, synthetic construct
  misc_feature 1..20: note = C9Orf72 CTCN PAM targeting sequence
  source 1..20: mol_type = other RNA
ggaggctgaggcaggagaat

SEQ ID NO: 16531 - RNA, 20 nt, synthetic construct
  misc_feature 1..20: note = C9Orf72 CTCN PAM targeting sequence
  source 1..20: mol_type = other RNA
agagcagctggaatgagagg

SEQ ID NO: 16532 - RNA, 20 nt, synthetic construct
  misc_feature 1..20: note = C9Orf72 CTCN PAM targeting sequence
  source 1..20: mol_type = other RNA
gcctccagagcagctggaat

SEQ ID NO: 16533 - RNA, 20 nt, synthetic construct
  misc_feature 1..20: note = C9Orf72 CTCN PAM targeting sequence
  source 1..20: mol_type = other RNA
tgcctcagcctccagagcag

SEQ ID NO: 16534 - RNA, 20 nt, synthetic construct
  misc_feature 1..20: note = C9Orf72 CTCN PAM targeting sequence
  source 1..20: mol_type = other RNA
ctggttcaagcgattctcct

SEQ ID NO: 16535 - RNA, 20 nt, synthetic construct
  misc_feature 1..20: note = C9Orf72 CTCN PAM targeting sequence
  source 1..20: mol_type = other RNA
acctccctggttcaagcgat

SEQ ID NO: 16536 - RNA, 20 nt, synthetic construct
  misc_feature 1..20: note = C9Orf72 CTCN PAM targeting sequence
  source 1..20: mol_type = other RNA
ctgcaacctccacctccctg

SEQ ID NO: 16537 - RNA, 20 nt, synthetic construct
  misc_feature 1..20: note = C9Orf72 CTCN PAM targeting sequence
  source 1..20: mol_type = other RNA
gctcactgcaacctccacct

SEQ ID NO: 16538 - RNA, 20 nt, synthetic construct
  misc_feature 1..20: note = C9Orf72 CTCN PAM targeting sequence
  source 1..20: mol_type = other RNA
agtgtgggtgacagagcaag

SEQ ID NO: 16539 - RNA, 20 nt, synthetic construct
  misc_feature 1..20: note = C9Orf72 CTCN PAM targeting sequence
  source 1..20: mol_type = other RNA
gtcacccacactggagtgca

SEQ ID NO: 16540 - RNA, 20 nt, synthetic construct
  misc_feature 1..20: note = C9Orf72 CTCN PAM targeting sequence
  source 1..20: mol_type = other RNA
atctcaaaataaaaaaaaaa

SEQ ID NO: 16541 - RNA, 20 nt, synthetic construct
  misc_feature 1..20: note = C9Orf72 CTCN PAM targeting sequence
  source 1..20: mol_type = other RNA
aaataaaaaaaaaaaaagaa

SEQ ID NO: 16542 - RNA, 20 nt, synthetic construct
  misc_feature 1..20: note = C9Orf72 CTCN PAM targeting sequence
  source 1..20: mol_type = other RNA
agtctgtagaagatacatgg

SEQ ID NO: 16543 - RNA, 20 nt, synthetic construct
  misc_feature 1..20: note = C9Orf72 CTCN PAM targeting sequence
  source 1..20: mol_type = other RNA
ctgatatcagggcattctgg

SEQ ID NO: 16544 - RNA, 20 nt, synthetic construct
  misc_feature 1..20: note = C9Orf72 CTCN PAM targeting sequence
  source 1..20: mol_type = other RNA
gatatcagggcattctggga

SEQ ID NO: 16545 - RNA, 20 nt, synthetic construct
  misc_feature 1..20: note = C9Orf72 CTCN PAM targeting sequence
  source 1..20: mol_type = other RNA
cagaatgccctgatatcaga

SEQ ID NO: 16546 - RNA, 20 nt, synthetic construct
  misc_feature 1..20: note = C9Orf72 CTCN PAM targeting sequence
  source 1..20: mol_type = other RNA
gagaagcggacaattaggcc

SEQ ID NO: 16547 - RNA, 20 nt, synthetic construct
  misc_feature 1..20: note = C9Orf72 CTCN PAM targeting sequence
  source 1..20: mol_type = other RNA
gagacaaacacctttcattt

SEQ ID NO: 16548 - RNA, 20 nt, synthetic construct
  misc_feature 1..20: note = C9Orf72 CTCN PAM targeting sequence
  source 1..20: mol_type = other RNA
tcctgcaagtctaggcctaa

SEQ ID NO: 16549 - RNA, 20 nt, synthetic construct
  misc_feature 1..20: note = C9Orf72 CTCN PAM targeting sequence
  source 1..20: mol_type = other RNA
gcttaagtcctgctcatcct

SEQ ID NO: 16550 - RNA, 20 nt, synthetic construct
  misc_feature 1..20: note = C9Orf72 CTCN PAM targeting sequence
  source 1..20: mol_type = other RNA
tttggcttccatgtcctcag

SEQ ID NO: 16551 - RNA, 20 nt, synthetic construct
  misc_feature 1..20: note = C9Orf72 CTCN PAM targeting sequence
  source 1..20: mol_type = other RNA
cccccaggccattgtatgta

SEQ ID NO: 16552 - RNA, 20 nt, synthetic construct
  misc_feature 1..20: note = C9Orf72 CTCN PAM targeting sequence
  source 1..20: mol_type = other RNA
cacccccaggccattgtatg

SEQ ID NO: 16553 - RNA, 20 nt, synthetic construct
  misc_feature 1..20: note = C9Orf72 CTCN PAM targeting sequence
  source 1..20: mol_type = other RNA
gggaagttccctatggagct

SEQ ID NO: 16554 - RNA, 20 nt, synthetic construct
  misc_feature 1..20: note = C9Orf72 CTCN PAM targeting sequence
  source 1..20: mol_type = other RNA
atagggaacttcccagagtt

SEQ ID NO: 16555 - RNA, 20 nt, synthetic construct
  misc_feature 1..20: note = C9Orf72 CTCN PAM targeting sequence
  source 1..20: mol_type = other RNA
ttcttcttccagatctgcct

SEQ ID NO: 16556 - RNA, 20 nt, synthetic construct
  misc_feature 1..20: note = C9Orf72 CTCN PAM targeting sequence
  source 1..20: mol_type = other RNA
aggcattattcttgtctatt

SEQ ID NO: 16557 - RNA, 20 nt, synthetic construct
  misc_feature 1..20: note = C9Orf72 CTCN PAM targeting sequence
  source 1..20: mol_type = other RNA
attagcaccaacatcttgga

SEQ ID NO: 16558 - RNA, 20 nt, synthetic construct
  misc_feature 1..20: note = C9Orf72 CTCN PAM targeting sequence
  source 1..20: mol_type = other RNA
tatgaaacaattttatacat

SEQ ID NO: 16559 - RNA, 20 nt, synthetic construct
  misc_feature 1..20: note = C9Orf72 CTCN PAM targeting sequence
  source 1..20: mol_type = other RNA
tgagaccacacaagtgacca

SEQ ID NO: 16560 - RNA, 20 nt, synthetic construct
  misc_feature 1..20: note = C9Orf72 CTCN PAM targeting sequence
  source 1..20: mol_type = other RNA
ggagcacttcctcctatgaa

SEQ ID NO: 16561 - RNA, 20 nt, synthetic construct
  misc_feature 1..20: note = C9Orf72 CTCN PAM targeting sequence
  source 1..20: mol_type = other RNA
caccacccacctgtcccacc

SEQ ID NO: 16562 - RNA, 20 nt, synthetic construct
  misc_feature 1..20: note = C9Orf72 CTCN PAM targeting sequence
  source 1..20: mol_type = other RNA
cttgacatttttggagccaa

SEQ ID NO: 16563 - RNA, 20 nt, synthetic construct
  misc_feature 1..20: note = C9Orf72 CTCN PAM targeting sequence
  source 1..20: mol_type = other RNA
aaaaatgtcaagcgagtatt

SEQ ID NO: 16564 - RNA, 20 nt, synthetic construct
  misc_feature 1..20: note = C9Orf72 CTCN PAM targeting sequence
  source 1..20: mol_type = other RNA
tgaagacgaattaatccctg

SEQ ID NO: 16565 - RNA, 20 nt, synthetic construct
  misc_feature 1..20: note = C9Orf72 CTCN PAM targeting sequence
  source 1..20: mol_type = other RNA
gcagtgttggaaattgctgc

SEQ ID NO: 16566 - RNA, 20 nt, synthetic construct
  misc_feature 1..20: note = C9Orf72 CTCN PAM targeting sequence
  source 1..20: mol_type = other RNA
gaccaacagctcccctaaga

SEQ ID NO: 16567 - RNA, 20 nt, synthetic construct
  misc_feature 1..20: note = C9Orf72 CTCN PAM targeting sequence
  source 1..20: mol_type = other RNA
cctaagatactgagcagctt

SEQ ID NO: 16568 - RNA, 20 nt, synthetic construct
  misc_feature 1..20: note = C9Orf72 CTCN PAM targeting sequence
  source 1..20: mol_type = other RNA
gtatcttaggggagctgttg

SEQ ID NO: 16569 - RNA, 20 nt, synthetic construct
  misc_feature 1..20: note = C9Orf72 CTCN PAM targeting sequence
  source 1..20: mol_type = other RNA
ggaagctgctcagtatctta

SEQ ID NO: 16570 - RNA, 20 nt, synthetic construct
  misc_feature 1..20: note = C9Orf72 CTCN PAM targeting sequence
  source 1..20: mol_type = other RNA
acctcaggaagctgctcagt

SEQ ID NO: 16571 - RNA, 20 nt, synthetic construct
  misc_feature 1..20: note = C9Orf72 CTCN PAM targeting sequence
  source 1..20: mol_type = other RNA
ctagatttcccatcagaacc

SEQ ID NO: 16572 - RNA, 20 nt, synthetic construct
  misc_feature 1..20: note = C9Orf72 CTCN PAM targeting sequence
  source 1..20: mol_type = other RNA
acatttctccctagatttcc

SEQ ID NO: 16573 - RNA, 20 nt, synthetic construct
  misc_feature 1..20: note = C9Orf72 CTCN PAM targeting sequence
  source 1..20: mol_type = other RNA
gtaccttctgctcaacattt

SEQ ID NO: 16574 - RNA, 20 nt, synthetic construct
  misc_feature 1..20: note = C9Orf72 CTCN PAM targeting sequence
  source 1..20: mol_type = other RNA
tactttattgataggaataa

SEQ ID NO: 16575 - RNA, 20 nt, synthetic construct
  misc_feature 1..20: note = C9Orf72 CTCN PAM targeting sequence
  source 1..20: mol_type = other RNA
cctactttattgataggaat

SEQ ID NO: 16576 - RNA, 20 nt, synthetic construct
  misc_feature 1..20: note = C9Orf72 CTCN PAM targeting sequence
  source 1..20: mol_type = other RNA
ttgctaagccacttctctcc

SEQ ID NO: 16577 - RNA, 20 nt, synthetic construct
  misc_feature 1..20: note = C9Orf72 CTCN PAM targeting sequence
  source 1..20: mol_type = other RNA
tgtggcagcatggagacaat

SEQ ID NO: 16578 - RNA, 20 nt, synthetic construct
  misc_feature 1..20: note = C9Orf72 CTCN PAM targeting sequence
  source 1..20: mol_type = other RNA
atgctgccacatgaggcatt

SEQ ID NO: 16579 - RNA, 20 nt, synthetic construct
  misc_feature 1..20: note = C9Orf72 CTCN PAM targeting sequence
  source 1..20: mol_type = other RNA
ttgtggagggagtggttgtt

SEQ ID NO: 16580 - RNA, 20 nt, synthetic construct
  misc_feature 1..20: note = C9Orf72 CTCN PAM targeting sequence
  source 1..20: mol_type = other RNA
acaaagagctgccagatgtg

SEQ ID NO: 16581 - RNA, 20 nt, synthetic construct
  misc_feature 1..20: note = C9Orf72 CTCN PAM targeting sequence
  source 1..20: mol_type = other RNA
ctccacaaagagctgccaga

SEQ ID NO: 16582 - RNA, 20 nt, synthetic construct
  misc_feature 1..20: note = C9Orf72 CTCN PAM targeting sequence
  source 1..20: mol_type = other RNA
taacaaccactccctccaca

SEQ ID NO: 16583 - RNA, 20 nt, synthetic construct
  misc_feature 1..20: note = C9Orf72 CTCN PAM targeting sequence
  source 1..20: mol_type = other RNA
tgaaggtagagcctctggct

SEQ ID NO: 16584 - RNA, 20 nt, synthetic construct
  misc_feature 1..20: note = C9Orf72 CTCN PAM targeting sequence
  source 1..20: mol_type = other RNA
accttcaagagctacttttt

SEQ ID NO: 16585 - RNA, 20 nt, synthetic construct
  misc_feature 1..20: note = C9Orf72 CTCN PAM targeting sequence
  source 1..20: mol_type = other RNA
ggctcagtggtgtctgagag

SEQ ID NO: 16586 - RNA, 20 nt, synthetic construct
  misc_feature 1..20: note = C9Orf72 CTCN PAM targeting sequence
  source 1..20: mol_type = other RNA
gtggtgtctgagagaatgtc

SEQ ID NO: 16587 - RNA, 20 nt, synthetic construct
  misc_feature 1..20: note = C9Orf72 CTCN PAM targeting sequence
  source 1..20: mol_type = other RNA
gacaccactgagccagaggc

SEQ ID NO: 16588 - RNA, 20 nt, synthetic construct
  misc_feature 1..20: note = C9Orf72 CTCN PAM targeting sequence
  source 1..20: mol_type = other RNA
cagacaccactgagccagag

SEQ ID NO: 16589 - RNA, 20 nt, synthetic construct
  misc_feature 1..20: note = C9Orf72 CTCN PAM targeting sequence
  source 1..20: mol_type = other RNA
aaagccacatgtctagtggc

SEQ ID NO: 16590 - RNA, 20 nt, synthetic construct
  misc_feature 1..20: note = C9Orf72 CTCN PAM targeting sequence
  source 1..20: mol_type = other RNA
gtagtcacaagtggttggaa

SEQ ID NO: 16591 - RNA, 20 nt, synthetic construct
  misc_feature 1..20: note = C9Orf72 CTCN PAM targeting sequence
  source 1..20: mol_type = other RNA
tggtattactatagataatg

SEQ ID NO: 16592 - RNA, 20 nt, synthetic construct
  misc_feature 1..20: note = C9Orf72 CTCN PAM targeting sequence
  source 1..20: mol_type = other RNA
cttggtattactatagataa

SEQ ID NO: 16593 - RNA, 20 nt, synthetic construct
  misc_feature 1..20: note = C9Orf72 CTCN PAM targeting sequence
  source 1..20: mol_type = other RNA
atttcctttatcatctgtgg

SEQ ID NO: 16594 - RNA, 20 nt, synthetic construct
  misc_feature 1..20: note = C9Orf72 CTCN PAM targeting sequence
  source 1..20: mol_type = other RNA
tgggaaaattgctagcatat

SEQ ID NO: 16595 - RNA, 20 nt, synthetic construct
  misc_feature 1..20: note = C9Orf72 CTCN PAM targeting sequence
  source 1..20: mol_type = other RNA
catgggaaaattgctagcat

SEQ ID NO: 16596 - RNA, 20 nt, synthetic construct
  misc_feature 1..20: note = C9Orf72 CTCN PAM targeting sequence
  source 1..20: mol_type = other RNA
tctctgaccaaattagaaac

SEQ ID NO: 16597 - RNA, 20 nt, synthetic construct
  misc_feature 1..20: note = C9Orf72 CTCN PAM targeting sequence
  source 1..20: mol_type = other RNA
gaccaaattagaaacaaaga

SEQ ID NO: 16598 - RNA, 20 nt, synthetic construct
  misc_feature 1..20: note = C9Orf72 CTCN PAM targeting sequence
  source 1..20: mol_type = other RNA
ttgtttctaatttggtcaga

SEQ ID NO: 16599 - RNA, 20 nt, synthetic construct
  misc_feature 1..20: note = C9Orf72 CTCN PAM targeting sequence
  source 1..20: mol_type = other RNA
ggacatcaacaagggatgaa

SEQ ID NO: 16600 - RNA, 20 nt, synthetic construct
  misc_feature 1..20: note = C9Orf72 CTCN PAM targeting sequence
  source 1..20: mol_type = other RNA
gccagtcctatttattcatc

SEQ ID NO: 16601 - RNA, 20 nt, synthetic construct
  misc_feature 1..20: note = C9Orf72 CTCN PAM targeting sequence
  source 1..20: mol_type = other RNA
taaaatgatatctggcaggc

SEQ ID NO: 16602 - RNA, 20 nt, synthetic construct
  misc_feature 1..20: note = C9Orf72 CTCN PAM targeting sequence
  source 1..20: mol_type = other RNA
cactaatctctgagcctttg

SEQ ID NO: 16603 - RNA, 20 nt, synthetic construct
  misc_feature 1..20: note = C9Orf72 CTCN PAM targeting sequence
  source 1..20: mol_type = other RNA
gagcctttgcattatcctga

SEQ ID NO: 16604 - RNA, 20 nt, synthetic construct
  misc_feature 1..20: note = C9Orf72 CTCN PAM targeting sequence
  source 1..20: mol_type = other RNA
gagattagtgggagggcctg

SEQ ID NO: 16605 - RNA, 20 nt, synthetic construct
  misc_feature 1..20: note = C9Orf72 CTCN PAM targeting sequence
  source 1..20: mol_type = other RNA
agctactcttggcaacatgt

SEQ ID NO: 16606 - RNA, 20 nt, synthetic construct
  misc_feature 1..20: note = C9Orf72 CTCN PAM targeting sequence
  source 1..20: mol_type = other RNA
tggcaacatgtacaccccct

SEQ ID NO: 16607 - RNA, 20 nt, synthetic construct
  misc_feature 1..20: note = C9Orf72 CTCN PAM targeting sequence
  source 1..20: mol_type = other RNA
gcccctctgctgccatggtg

SEQ ID NO: 16608 - RNA, 20 nt, synthetic construct
  misc_feature 1..20: note = C9Orf72 CTCN PAM targeting sequence
  source 1..20: mol_type = other RNA
gctgccatggtgggcttttt

SEQ ID NO: 16609 - RNA, 20 nt, synthetic construct
  misc_feature 1..20: note = C9Orf72 CTCN PAM targeting sequence
  source 1..20: mol_type = other RNA
ctgttgtgccccaggctgga

SEQ ID NO: 16610 - RNA, 20 nt, synthetic construct
  misc_feature 1..20: note = C9Orf72 CTCN PAM targeting sequence
  source 1..20: mol_type = other RNA
agcctggggcacaacagcga

SEQ ID NO: 16611 - RNA, 20 nt, synthetic construct
  misc_feature 1..20: note = C9Orf72 CTCN PAM targeting sequence
  source 1..20: mol_type = other RNA
gctcactgcaacctccgcct

SEQ ID NO: 16612 - RNA, 20 nt, synthetic construct
  misc_feature 1..20: note = C9Orf72 CTCN PAM targeting sequence
  source 1..20: mol_type = other RNA
ctgcaacctccgcctcctgg

SEQ ID NO: 16613 - RNA, 20 nt, synthetic construct
  misc_feature 1..20: note = C9Orf72 CTCN PAM targeting sequence
  source 1..20: mol_type = other RNA
gcctcctgggttcaagcaat

SEQ ID NO: 16614 - RNA, 20 nt, synthetic construct
  misc_feature 1..20: note = C9Orf72 CTCN PAM targeting sequence
  source 1..20: mol_type = other RNA
tgggttcaagcaattctcct

SEQ ID NO: 16615 - RNA, 20 nt, synthetic construct
  misc_feature 1..20: note = C9Orf72 CTCN PAM targeting sequence
  source 1..20: mol_type = other RNA
tgcctcagcctcctgagtag

SEQ ID NO: 16616 - RNA, 20 nt, synthetic construct
  misc_feature 1..20: note = C9Orf72 CTCN PAM targeting sequence
  source 1..20: mol_type = other RNA
gcctcctgagtagctgggat

SEQ ID NO: 16617 - RNA, 20 nt, synthetic construct
  misc_feature 1..20: note = C9Orf72 CTCN PAM targeting sequence
  source 1..20: mol_type = other RNA
tgagtagctgggattatggg

SEQ ID NO: 16618 - RNA, 20 nt, synthetic construct
  misc_feature 1..20: note = C9Orf72 CTCN PAM targeting sequence
  source 1..20: mol_type = other RNA
ggaggctgaggcaggagaat

SEQ ID NO: 16619 - RNA, 20 nt, synthetic construct
  misc_feature 1..20: note = C9Orf72 CTCN PAM targeting sequence
  source 1..20: mol_type = other RNA
actaaaaatacaaaaattag

SEQ ID NO: 16620 - RNA, 20 nt, synthetic construct
  misc_feature 1..20: note = C9Orf72 CTCN PAM targeting sequence
  source 1..20: mol_type = other RNA
tgacctcaggtgatccaccc

SEQ ID NO: 16621 - RNA, 20 nt, synthetic construct
  misc_feature 1..20: note = C9Orf72 CTCN PAM targeting sequence
  source 1..20: mol_type = other RNA
ggtgatccacccgcctaggc

SEQ ID NO: 16622 - RNA, 20 nt, synthetic construct
  misc_feature 1..20: note = C9Orf72 CTCN PAM targeting sequence
  source 1..20: mol_type = other RNA
caaagtgttgggattacagg

SEQ ID NO: 16623 - RNA, 20 nt, synthetic construct
  misc_feature 1..20: note = C9Orf72 CTCN PAM targeting sequence
  source 1..20: mol_type = other RNA
cgcctgtaatcccaacactt

SEQ ID NO: 16624 - RNA, 20 nt, synthetic construct
  misc_feature 1..20: note = C9Orf72 CTCN PAM targeting sequence
  source 1..20: mol_type = other RNA
ctaagcaaagagaaacggtt

SEQ ID NO: 16625 - RNA, 20 nt, synthetic construct
  misc_feature 1..20: note = C9Orf72 CTCN PAM targeting sequence
  source 1..20: mol_type = other RNA
aagcaaagagaaacggttgt

SEQ ID NO: 16626 - RNA, 20 nt, synthetic construct
  misc_feature 1..20: note = C9Orf72 CTCN PAM targeting sequence
  source 1..20: mol_type = other RNA
ttgcttagagagcccttcat

SEQ ID NO: 16627 - RNA, 20 nt, synthetic construct
  misc_feature 1..20: note = C9Orf72 CTCN PAM targeting sequence
  source 1..20: mol_type = other RNA
gtaggtcaggctgggaggat

SEQ ID NO: 16628 - RNA, 20 nt, synthetic construct
  misc_feature 1..20: note = C9Orf72 CTCN PAM targeting sequence
  source 1..20: mol_type = other RNA
cagcctgacctacagagatt

SEQ ID NO: 16629 - RNA, 20 nt, synthetic construct
  misc_feature 1..20: note = C9Orf72 CTCN PAM targeting sequence
  source 1..20: mol_type = other RNA
gtttccccacctgtaaaaga

SEQ ID NO: 16630 - RNA, 20 nt, synthetic construct
  misc_feature 1..20: note = C9Orf72 CTCN PAM targeting sequence
  source 1..20: mol_type = other RNA
gagccattacatgccttgcc

SEQ ID NO: 16631 - RNA, 20 nt, synthetic construct
  misc_feature 1..20: note = C9Orf72 CTCN PAM targeting sequence
  source 1..20: mol_type = other RNA
gagcctcagtttccccacct

SEQ ID NO: 16632 - RNA, 20 nt, synthetic construct
  misc_feature 1..20: note = C9Orf72 CTCN PAM targeting sequence
  source 1..20: mol_type = other RNA
ttcttctataatggctgagt

SEQ ID NO: 16633 - RNA, 20 nt, synthetic construct
  misc_feature 1..20: note = C9Orf72 CTCN PAM targeting sequence
  source 1..20: mol_type = other RNA
gccattatagaagaaagagc

SEQ ID NO: 16634 - RNA, 20 nt, synthetic construct
  misc_feature 1..20: note = C9Orf72 CTCN PAM targeting sequence
  source 1..20: mol_type = other RNA
gggttgcttcttgtcaggcg

SEQ ID NO: 16635 - RNA, 20 nt, synthetic construct
  misc_feature 1..20: note = C9Orf72 CTCN PAM targeting sequence
  source 1..20: mol_type = other RNA
gtacagatgatgtttcaaaa

SEQ ID NO: 16636 - RNA, 20 nt, synthetic construct
  misc_feature 1..20: note = C9Orf72 CTCN PAM targeting sequence
  source 1..20: mol_type = other RNA
tcattgctggctactttagg

SEQ ID NO: 16637 - RNA, 20 nt, synthetic construct
  misc_feature 1..20: note = C9Orf72 CTCN PAM targeting sequence
  source 1..20: mol_type = other RNA
ctaaagtagccagcaatgaa

SEQ ID NO: 16638 - RNA, 20 nt, synthetic construct
  misc_feature 1..20: note = C9Orf72 CTCN PAM targeting sequence
  source 1..20: mol_type = other RNA
ggctcatgcgagaggttctg

SEQ ID NO: 16639 - RNA, 20 nt, synthetic construct
  misc_feature 1..20: note = C9Orf72 CTCN PAM targeting sequence
  source 1..20: mol_type = other RNA
tgcgagaggttctgcttctt

SEQ ID NO: 16640 - RNA, 20 nt, synthetic construct
  misc_feature 1..20: note = C9Orf72 CTCN PAM targeting sequence
  source 1..20: mol_type = other RNA
catgagccagagctactccc

SEQ ID NO: 16641 - RNA, 20 nt, synthetic construct
  misc_feature 1..20: note = C9Orf72 CTCN PAM targeting sequence
  source 1..20: mol_type = other RNA
cgcatgagccagagctactc

SEQ ID NO: 16642 - RNA, 20 nt, synthetic construct
  misc_feature 1..20: note = C9Orf72 CTCN PAM targeting sequence
  source 1..20: mol_type = other RNA
cccaagcaactctgagagaa

SEQ ID NO: 16643 - RNA, 20 nt, synthetic construct
  misc_feature 1..20: note = C9Orf72 CTCN PAM targeting sequence
  source 1..20: mol_type = other RNA
gagagaagtgtatgtgtggc

SEQ ID NO: 16644 - RNA, 20 nt, synthetic construct
  misc_feature 1..20: note = C9Orf72 CTCN PAM targeting sequence
  source 1..20: mol_type = other RNA
gagttgcttgggtgagtgca

SEQ ID NO: 16645 - RNA, 20 nt, synthetic construct
  misc_feature 1..20: note = C9Orf72 CTCN PAM targeting sequence
  source 1..20: mol_type = other RNA
cagagttgcttgggtgagtg

SEQ ID NO: 16646 - RNA, 20 nt, synthetic construct
  misc_feature 1..20: note = C9Orf72 CTCN PAM targeting sequence
  source 1..20: mol_type = other RNA
tagggcaacatgaggtcagt

SEQ ID NO: 16647 - RNA, 20 nt, synthetic construct
  misc_feature 1..20: note = C9Orf72 CTCN PAM targeting sequence
  source 1..20: mol_type = other RNA
tgttgccctaagaggtagcc

SEQ ID NO: 16648 - RNA, 20 nt, synthetic construct
  misc_feature 1..20: note = C9Orf72 CTCN PAM targeting sequence
  source 1..20: mol_type = other RNA
taaaggcccagccacaagcc

SEQ ID NO: 16649 - RNA, 20 nt, synthetic construct
  misc_feature 1..20: note = C9Orf72 CTCN PAM targeting sequence
  source 1..20: mol_type = other RNA
aaaaacgggtgctttttaga

SEQ ID NO: 16650 - RNA, 20 nt, synthetic construct
  misc_feature 1..20: note = C9Orf72 CTCN PAM targeting sequence
  source 1..20: mol_type = other RNA
accaccaaaactatcctcta

SEQ ID NO: 16651 - RNA, 20 nt, synthetic construct
  misc_feature 1..20: note = C9Orf72 CTCN PAM targeting sequence
  source 1..20: mol_type = other RNA
atcattagccaagaggcacc

SEQ ID NO: 16652 - RNA, 20 nt, synthetic construct
  misc_feature 1..20: note = C9Orf72 CTCN PAM targeting sequence
  source 1..20: mol_type = other RNA
tggctaatgattgagattta

SEQ ID NO: 16653 - RNA, 20 nt, synthetic construct
  misc_feature 1..20: note = C9Orf72 CTCN PAM targeting sequence
  source 1..20: mol_type = other RNA
atcccttatcactgccattt

SEQ ID NO: 16654 - RNA, 20 nt, synthetic construct
  misc_feature 1..20: note = C9Orf72 CTCN PAM targeting sequence
  source 1..20: mol_type = other RNA
ccatcccttatcactgccat

SEQ ID NO: 16655 - RNA, 20 nt, synthetic construct
  misc_feature 1..20: note = C9Orf72 CTCN PAM targeting sequence
  source 1..20: mol_type = other RNA
acatctgaaccacattcctc

SEQ ID NO: 16656 - RNA, 20 nt, synthetic construct
  misc_feature 1..20: note = C9Orf72 CTCN PAM targeting sequence
  source 1..20: mol_type = other RNA
caaagtgctgggattacaga

SEQ ID NO: 16657 - RNA, 20 nt, synthetic construct
  misc_feature 1..20: note = C9Orf72 CTCN PAM targeting sequence
  source 1..20: mol_type = other RNA
agtgatccttctgccttgac

SEQ ID NO: 16658 - RNA, 20 nt, synthetic construct
  misc_feature 1..20: note = C9Orf72 CTCN PAM targeting sequence
  source 1..20: mol_type = other RNA
ggagttccagaccagcctgg

SEQ ID NO: 16659 - RNA, 20 nt, synthetic construct
  misc_feature 1..20: note = C9Orf72 CTCN PAM targeting sequence
  source 1..20: mol_type = other RNA
tgagctcaagtgatccttct

SEQ ID NO: 16660 - RNA, 20 nt, synthetic construct
  misc_feature 1..20: note = C9Orf72 CTCN PAM targeting sequence
  source 1..20: mol_type = other RNA
ctacgtttcccaggctggtc

SEQ ID NO: 16661 - RNA, 20 nt, synthetic construct
  misc_feature 1..20: note = C9Orf72 CTCN PAM targeting sequence
  source 1..20: mol_type = other RNA
acaaaaaatttaaaaattag

SEQ ID NO: 16662 - RNA, 20 nt, synthetic construct
  misc_feature 1..20: note = C9Orf72 CTCN PAM targeting sequence
  source 1..20: mol_type = other RNA
taagtagctggggctacaaa

SEQ ID NO: 16663 - RNA, 20 nt, synthetic construct
  misc_feature 1..20: note = C9Orf72 CTCN PAM targeting sequence
  source 1..20: mol_type = other RNA
gcctcctaagtagctggggc

SEQ ID NO: 16664 - RNA, 20 nt, synthetic construct
  misc_feature 1..20: note = C9Orf72 CTCN PAM targeting sequence
  source 1..20: mol_type = other RNA
cacctcagcctcctaagtag

SEQ ID NO: 16665 - RNA, 20 nt, synthetic construct
  misc_feature 1..20: note = C9Orf72 CTCN PAM targeting sequence
  source 1..20: mol_type = other RNA
agtgatcctcccacctcagc

SEQ ID NO: 16666 - RNA, 20 nt, synthetic construct
  misc_feature 1..20: note = C9Orf72 CTCN PAM targeting sequence
  source 1..20: mol_type = other RNA
tgggctcaagtgatcctccc

SEQ ID NO: 16667 - RNA, 20 nt, synthetic construct
  misc_feature 1..20: note = C9Orf72 CTCN PAM targeting sequence
  source 1..20: mol_type = other RNA
agcctcctgggctcaagtga

SEQ ID NO: 16668 - RNA, 20 nt, synthetic construct
  misc_feature 1..20: note = C9Orf72 CTCN PAM targeting sequence
  source 1..20: mol_type = other RNA
ctgcatcctctagcctcctg

SEQ ID NO: 16669 - RNA, 20 nt, synthetic construct
  misc_feature 1..20: note = C9Orf72 CTCN PAM targeting sequence
  source 1..20: mol_type = other RNA
gtcacccaggctggtgtgat

SEQ ID NO: 16670 - RNA, 20 nt, synthetic construct
  misc_feature 1..20: note = C9Orf72 CTCN PAM targeting sequence
  source 1..20: mol_type = other RNA
ctctgtcacccaggctggtg

SEQ ID NO: 16671 - RNA, 20 nt, synthetic construct
  misc_feature 1..20: note = C9Orf72 CTCN PAM targeting sequence
  source 1..20: mol_type = other RNA
aaaaaaaaaaaaaaaaaaag

SEQ ID NO: 16672 - RNA, 20 nt, synthetic construct
  misc_feature 1..20: note = C9Orf72 CTCN PAM targeting sequence
  source 1..20: mol_type = other RNA
cacttgttactttttttttt

SEQ ID NO: 16673 - RNA, 20 nt, synthetic construct
  misc_feature 1..20: note = C9Orf72 CTCN PAM targeting sequence
  source 1..20: mol_type = other RNA
tcacacttgttacttttttt

SEQ ID NO: 16674 - RNA, 20 nt, synthetic construct
  misc_feature 1..20: note = C9Orf72 CTCN PAM targeting sequence
  source 1..20: mol_type = other RNA
tgacatatattatttcatct

SEQ ID NO: 16675 - RNA, 20 nt, synthetic construct
  misc_feature 1..20: note = C9Orf72 CTCN PAM targeting sequence
  source 1..20: mol_type = other RNA
cacatcatcatatgacagac

SEQ ID NO: 16676 - RNA, 20 nt, synthetic construct
  misc_feature 1..20: note = C9Orf72 CTCN PAM targeting sequence
  source 1..20: mol_type = other RNA
tcctcccacatcatcatatg

SEQ ID NO: 16677 - RNA, 20 nt, synthetic construct
  misc_feature 1..20: note = C9Orf72 CTCN PAM targeting sequence
  source 1..20: mol_type = other RNA
tcatcctcccacatcatcat

SEQ ID NO: 16678 - RNA, 20 nt, synthetic construct
  misc_feature 1..20: note = C9Orf72 CTCN PAM targeting sequence
  source 1..20: mol_type = other RNA
catatggagtttcacttcct

SEQ ID NO: 16679 - RNA, 20 nt, synthetic construct
  misc_feature 1..20: note = C9Orf72 CTCN PAM targeting sequence
  source 1..20: mol_type = other RNA
atatgggagggcttcacaca

SEQ ID NO: 16680 - RNA, 20 nt, synthetic construct
  misc_feature 1..20: note = C9Orf72 CTCN PAM targeting sequence
  source 1..20: mol_type = other RNA
ctctccatgcggcagtggtg

SEQ ID NO: 16681 - RNA, 20 nt, synthetic construct
  misc_feature 1..20: note = C9Orf72 CTCN PAM targeting sequence
  source 1..20: mol_type = other RNA
ccatgcggcagtggtggctg

SEQ ID NO: 16682 - RNA, 20 nt, synthetic construct
  misc_feature 1..20: note = C9Orf72 CTCN PAM targeting sequence
  source 1..20: mol_type = other RNA
atgcggcagtggtggctgtg

SEQ ID NO: 16683 - RNA, 20 nt, synthetic construct
  misc_feature 1..20: note = C9Orf72 CTCN PAM targeting sequence
  source 1..20: mol_type = other RNA
aaccacacagccaccactgc

SEQ ID NO: 16684 - RNA, 20 nt, synthetic construct
  misc_feature 1..20: note = C9Orf72 CTCN PAM targeting sequence
  source 1..20: mol_type = other RNA
accctggcctcaaaccacac

SEQ ID NO: 16685 - RNA, 20 nt, synthetic construct
  misc_feature 1..20: note = C9Orf72 CTCN PAM targeting sequence
  source 1..20: mol_type = other RNA
tgcctccaccctggcctcaa

SEQ ID NO: 16686 - RNA, 20 nt, synthetic construct
  misc_feature 1..20: note = C9Orf72 CTCN PAM targeting sequence
  source 1..20: mol_type = other RNA
agatttttctattttcctca

SEQ ID NO: 16687 - RNA, 20 nt, synthetic construct
  misc_feature 1..20: note = C9Orf72 CTCN PAM targeting sequence
  source 1..20: mol_type = other RNA
tctttgtgatgtgatgtgtc

SEQ ID NO: 16688 - RNA, 20 nt, synthetic construct
  misc_feature 1..20: note = C9Orf72 CTCN PAM targeting sequence
  source 1..20: mol_type = other RNA
gggcagcactgctcatcttt

SEQ ID NO: 16689 - RNA, 20 nt, synthetic construct
  misc_feature 1..20: note = C9Orf72 CTCN PAM targeting sequence
  source 1..20: mol_type = other RNA
aagatgtcaatgagtgatag

SEQ ID NO: 16690 - RNA, 20 nt, synthetic construct
  misc_feature 1..20: note = C9Orf72 CTCN PAM targeting sequence
  source 1..20: mol_type = other RNA
ttgacatcttagagatatca

SEQ ID NO: 16691 - RNA, 20 nt, synthetic construct
  misc_feature 1..20: note = C9Orf72 CTCN PAM targeting sequence
  source 1..20: mol_type = other RNA
aaggctttgatatgctattg

SEQ ID NO: 16692 - RNA, 20 nt, synthetic construct
  misc_feature 1..20: note = C9Orf72 CTCN PAM targeting sequence
  source 1..20: mol_type = other RNA
acccttgaagatttacagtg

SEQ ID NO: 16693 - RNA, 20 nt, synthetic construct
  misc_feature 1..20: note = C9Orf72 CTCN PAM targeting sequence
  source 1..20: mol_type = other RNA
tttgaccacagaaggaagtc

SEQ ID NO: 16694 - RNA, 20 nt, synthetic construct
  misc_feature 1..20: note = C9Orf72 CTCN PAM targeting sequence
  source 1..20: mol_type = other RNA
ggactggcattttgaggagc

SEQ ID NO: 16695 - RNA, 20 nt, synthetic construct
  misc_feature 1..20: note = C9Orf72 CTCN PAM targeting sequence
  source 1..20: mol_type = other RNA
aaatgccagtcctgagtgat

SEQ ID NO: 16696 - RNA, 20 nt, synthetic construct
  misc_feature 1..20: note = C9Orf72 CTCN PAM targeting sequence
  source 1..20: mol_type = other RNA
tcaaaatgccagtcctgagt

SEQ ID NO: 16697 - RNA, 20 nt, synthetic construct
  misc_feature 1..20: note = C9Orf72 CTCN PAM targeting sequence
  source 1..20: mol_type = other RNA
cttggcaaacactgatcttc

SEQ ID NO: 16698 - RNA, 20 nt, synthetic construct
  misc_feature 1..20: note = C9Orf72 CTCN PAM targeting sequence
  source 1..20: mol_type = other RNA
tggcaaacactgatcttcag

SEQ ID NO: 16699 - RNA, 20 nt, synthetic construct
  misc_feature 1..20: note = C9Orf72 CTCN PAM targeting sequence
  source 1..20: mol_type = other RNA
tttttgctttacttccccac

SEQ ID NO: 16700 - RNA, 20 nt, synthetic construct
  misc_feature 1..20: note = C9Orf72 CTCN PAM targeting sequence
  source 1..20: mol_type = other RNA
gtggggtggggaagtaaagc

SEQ ID NO: 16701 - RNA, 20 nt, synthetic construct
  misc_feature 1..20: note = C9Orf72 CTCN PAM targeting sequence
  source 1..20: mol_type = other RNA
caatcctagaggagaagaga

SEQ ID NO: 16702 - RNA, 20 nt, synthetic construct
  misc_feature 1..20: note = C9Orf72 CTCN PAM targeting sequence
  source 1..20: mol_type = other RNA
aggattgggagttagctcag

SEQ ID NO: 16703 - RNA, 20 nt, synthetic construct
  misc_feature 1..20: note = C9Orf72 CTCN PAM targeting sequence
  source 1..20: mol_type = other RNA
tctaggattgggagttagct

SEQ ID NO: 16704 - RNA, 20 nt, synthetic construct
  misc_feature 1..20: note = C9Orf72 CTCN PAM targeting sequence
  source 1..20: mol_type = other RNA
tctcctctaggattgggagt

SEQ ID NO: 16705 - RNA, 20 nt, synthetic construct
  misc_feature 1..20: note = C9Orf72 CTCN PAM targeting sequence
  source 1..20: mol_type = other RNA
catttgagggtaattgtcat

SEQ ID NO: 16706 - RNA, 20 nt, synthetic construct
  misc_feature 1..20: note = C9Orf72 CTCN PAM targeting sequence
  source 1..20: mol_type = other RNA
aatgtgagaattaccatttt

SEQ ID NO: 16707 - RNA, 20 nt, synthetic construct
  misc_feature 1..20: note = C9Orf72 CTCN PAM targeting sequence
  source 1..20: mol_type = other RNA
acgtgtggtctgggaaccag

SEQ ID NO: 16708 - RNA, 20 nt, synthetic construct
  misc_feature 1..20: note = C9Orf72 CTCN PAM targeting sequence
  source 1..20: mol_type = other RNA
cagatgatatcgatgctgct

SEQ ID NO: 16709 - RNA, 20 nt, synthetic construct
  misc_feature 1..20: note = C9Orf72 CTCN PAM targeting sequence
  source 1..20: mol_type = other RNA
agtctcctcctctcagatgt

SEQ ID NO: 16710 - RNA, 20 nt, synthetic construct
  misc_feature 1..20: note = C9Orf72 CTCN PAM targeting sequence
  source 1..20: mol_type = other RNA
agaatgttcattttgctccc

SEQ ID NO: 16711 - RNA, 20 nt, synthetic construct
  misc_feature 1..20: note = C9Orf72 CTCN PAM targeting sequence
  source 1..20: mol_type = other RNA
tcctctcagatgtactgaat

SEQ ID NO: 16712 - RNA, 20 nt, synthetic construct
  misc_feature 1..20: note = C9Orf72 CTCN PAM targeting sequence
  source 1..20: mol_type = other RNA
tctcagatgtactgaatcag

SEQ ID NO: 16713 - RNA, 20 nt, synthetic construct
  misc_feature 1..20: note = C9Orf72 CTCN PAM targeting sequence
  source 1..20: mol_type = other RNA
cagatgtactgaatcagaac

SEQ ID NO: 16714 - RNA, 20 nt, synthetic construct
  misc_feature 1..20: note = C9Orf72 CTCN PAM targeting sequence
  source 1..20: mol_type = other RNA
gatgtactgaatcagaactt

SEQ ID NO: 16715 - RNA, 20 nt, synthetic construct
  misc_feature 1..20: note = C9Orf72 CTCN PAM targeting sequence
  source 1..20: mol_type = other RNA
aactttaatgtgcatgtgaa

SEQ ID NO: 16716 - RNA, 20 nt, synthetic construct
  misc_feature 1..20: note = C9Orf72 CTCN PAM targeting sequence
  source 1..20: mol_type = other RNA
gtctgcatctcaaactttaa

SEQ ID NO: 16717 - RNA, 20 nt, synthetic construct
  misc_feature 1..20: note = C9Orf72 CTCN PAM targeting sequence
  source 1..20: mol_type = other RNA
ccccagatacactaaatcag

SEQ ID NO: 16718 - RNA, 20 nt, synthetic construct
  misc_feature 1..20: note = C9Orf72 CTCN PAM targeting sequence
  source 1..20: mol_type = other RNA
aggagattctgatgcacgtg

SEQ ID NO: 16719 - RNA, 20 nt, synthetic construct
  misc_feature 1..20: note = C9Orf72 CTCN PAM targeting sequence
  source 1..20: mol_type = other RNA
tggaggaagtacttcataag

SEQ ID NO: 16720 - RNA, 20 nt, synthetic construct
  misc_feature 1..20: note = C9Orf72 CTCN PAM targeting sequence
  source 1..20: mol_type = other RNA
tgagaaacccctatggtcca

SEQ ID NO: 16721 - RNA, 20 nt, synthetic construct
  misc_feature 1..20: note = C9Orf72 CTCN PAM targeting sequence
  source 1..20: mol_type = other RNA
ggagtccacacacacacacg

SEQ ID NO: 16722 - RNA, 20 nt, synthetic construct
  misc_feature 1..20: note = C9Orf72 CTCN PAM targeting sequence
  source 1..20: mol_type = other RNA
gtggtaacattggttttcac

SEQ ID NO: 16723 - RNA, 20 nt, synthetic construct
  misc_feature 1..20: note = C9Orf72 CTCN PAM targeting sequence
  source 1..20: mol_type = other RNA
acaaggtaggtggtggtata

SEQ ID NO: 16724 - RNA, 20 nt, synthetic construct
  misc_feature 1..20: note = C9Orf72 CTCN PAM targeting sequence
  source 1..20: mol_type = other RNA
attttcttgtttctaacaat

SEQ ID NO: 16725 - RNA, 20 nt, synthetic construct
  misc_feature 1..20: note = C9Orf72 CTCN PAM targeting sequence
  source 1..20: mol_type = other RNA
aaggctccattttcttgttt

SEQ ID NO: 16726 - RNA, 20 nt, synthetic construct
  misc_feature 1..20: note = C9Orf72 CTCN PAM targeting sequence
  source 1..20: mol_type = other RNA
ccaaggctccattttcttgt

SEQ ID NO: 16727 - RNA, 20 nt, synthetic construct
  misc_feature 1..20: note = C9Orf72 CTCN PAM targeting sequence
  source 1..20: mol_type = other RNA
ctccaaggctccattttctt

SEQ ID NO: 16728 - RNA, 20 nt, synthetic construct
  misc_feature 1..20: note = C9Orf72 CTCN PAM targeting sequence
  source 1..20: mol_type = other RNA
ttctctctccaaggctccat

SEQ ID NO: 16729 - RNA, 20 nt, synthetic construct
  misc_feature 1..20: note = C9Orf72 CTCN PAM targeting sequence
  source 1..20: mol_type = other RNA
tgtctgtcctccccacctca

SEQ ID NO: 16730 - RNA, 20 nt, synthetic construct
  misc_feature 1..20: note = C9Orf72 CTCN PAM targeting sequence
  source 1..20: mol_type = other RNA
ccacctcacgaatctctgtc

SEQ ID NO: 16731 - RNA, 20 nt, synthetic construct
  misc_feature 1..20: note = C9Orf72 CTCN PAM targeting sequence
  source 1..20: mol_type = other RNA
cgaatctctgtcctccccct

SEQ ID NO: 16732 - RNA, 20 nt, synthetic construct
  misc_feature 1..20: note = C9Orf72 CTCN PAM targeting sequence
  source 1..20: mol_type = other RNA
gtcctccccctgccctaatc

SEQ ID NO: 16733 - RNA, 20 nt, synthetic construct
  misc_feature 1..20: note = C9Orf72 CTCN PAM targeting sequence
  source 1..20: mol_type = other RNA
ccctgccctaatcagctctt

SEQ ID NO: 16734 - RNA, 20 nt, synthetic construct
  misc_feature 1..20: note = C9Orf72 CTCN PAM targeting sequence
  source 1..20: mol_type = other RNA
tcattcacaactactgcatt

SEQ ID NO: 16735 - RNA, 20 nt, synthetic construct
  misc_feature 1..20: note = C9Orf72 CTCN PAM targeting sequence
  source 1..20: mol_type = other RNA
ctgagtctgcttttgttttc

SEQ ID NO: 16736 - RNA, 20 nt, synthetic construct
  misc_feature 1..20: note = C9Orf72 CTCN PAM targeting sequence
  source 1..20: mol_type = other RNA
gagtctgcttttgttttcag

SEQ ID NO: 16737 - RNA, 20 nt, synthetic construct
  misc_feature 1..20: note = C9Orf72 CTCN PAM targeting sequence
  source 1..20: mol_type = other RNA
gagagggctgttagcaatgc

SEQ ID NO: 16738 - RNA, 20 nt, synthetic construct
  misc_feature 1..20: note = C9Orf72 CTCN PAM targeting sequence
  source 1..20: mol_type = other RNA
ctggcagccaagggccaaca

SEQ ID NO: 16739 - RNA, 20 nt, synthetic construct
  misc_feature 1..20: note = C9Orf72 CTCN PAM targeting sequence
  source 1..20: mol_type = other RNA
aacaaggaacttgcttcagt

SEQ ID NO: 16740 - RNA, 20 nt, synthetic construct
  misc_feature 1..20: note = C9Orf72 CTCN PAM targeting sequence
  source 1..20: mol_type = other RNA
tgtaaatgcaacagctgaag

SEQ ID NO: 16741 - RNA, 20 nt, synthetic construct
  misc_feature 1..20: note = C9Orf72 CTCN PAM targeting sequence
  source 1..20: mol_type = other RNA
ccctccctgctggagaccaa

SEQ ID NO: 16742 - RNA, 20 nt, synthetic construct
  misc_feature 1..20: note = C9Orf72 CTCN PAM targeting sequence
  source 1..20: mol_type = other RNA
ctgctggagaccaagtgaaa

SEQ ID NO: 16743 - RNA, 20 nt, synthetic construct
  misc_feature 1..20: note = C9Orf72 CTCN PAM targeting sequence
  source 1..20: mol_type = other RNA
agcagggagggggagcctgg

SEQ ID NO: 16744 - RNA, 20 nt, synthetic construct
  misc_feature 1..20: note = C9Orf72 CTCN PAM targeting sequence
  source 1..20: mol_type = other RNA
cattgggacctgctgttcag

SEQ ID NO: 16745 - RNA, 20 nt, synthetic construct
  misc_feature 1..20: note = C9Orf72 CTCN PAM targeting sequence
  source 1..20: mol_type = other RNA
tggctcccattgggacctgc

SEQ ID NO: 16746 - RNA, 20 nt, synthetic construct
  misc_feature 1..20: note = C9Orf72 CTCN PAM targeting sequence
  source 1..20: mol_type = other RNA
gggggtggatggatgtgctg

SEQ ID NO: 16747 - RNA, 20 nt, synthetic construct
  misc_feature 1..20: note = C9Orf72 CTCN PAM targeting sequence
  source 1..20: mol_type = other RNA
tcccagcttctgaattccaa

SEQ ID NO: 16748 - RNA, 20 nt, synthetic construct
  misc_feature 1..20: note = C9Orf72 CTCN PAM targeting sequence
  source 1..20: mol_type = other RNA
gaggcctgatagggtgacca

SEQ ID NO: 16749 - RNA, 20 nt, synthetic construct
  misc_feature 1..20: note = C9Orf72 CTCN PAM targeting sequence
  source 1..20: mol_type = other RNA
gagtgggaatacagtttgga

SEQ ID NO: 16750 - RNA, 20 nt, synthetic construct
  misc_feature 1..20: note = C9Orf72 CTCN PAM targeting sequence
  source 1..20: mol_type = other RNA
tggtgtctgtcaaactagga

SEQ ID NO: 16751 - RNA, 20 nt, synthetic construct
  misc_feature 1..20: note = C9Orf72 CTCN PAM targeting sequence
  source 1..20: mol_type = other RNA
tgtcctaggaaaactcttgg

SEQ ID NO: 16752 - RNA, 20 nt, synthetic construct
  misc_feature 1..20: note = C9Orf72 CTCN PAM targeting sequence
  source 1..20: mol_type = other RNA
gttttagcagtgaaattctc

SEQ ID NO: 16753 - RNA, 20 nt, synthetic construct
  misc_feature 1..20: note = C9Orf72 CTCN PAM targeting sequence
  source 1..20: mol_type = other RNA
ctgttttagcagtgaaattc

SEQ ID NO: 16754 - RNA, 20 nt, synthetic construct
  misc_feature 1..20: note = C9Orf72 CTCN PAM targeting sequence
  source 1..20: mol_type = other RNA
cactgcttttgtgccctggt

SEQ ID NO: 16755 - RNA, 20 nt, synthetic construct
  misc_feature 1..20: note = C9Orf72 CTCN PAM targeting sequence
  source 1..20: mol_type = other RNA
cacactgcttttgtgccctg

SEQ ID NO: 16756 - RNA, 20 nt, synthetic construct
  misc_feature 1..20: note = C9Orf72 CTCN PAM targeting sequence
  source 1..20: mol_type = other RNA
gttccaaattccagatagat

SEQ ID NO: 16757 - RNA, 20 nt, synthetic construct
  misc_feature 1..20: note = C9Orf72 CTCN PAM targeting sequence
  source 1..20: mol_type = other RNA
tagtcattctctgttccaaa

SEQ ID NO: 16758 - RNA, 20 nt, synthetic construct
  misc_feature 1..20: note = C9Orf72 CTCN PAM targeting sequence
  source 1..20: mol_type = other RNA
actcttagtcattctctgtt

SEQ ID NO: 16759 - RNA, 20 nt, synthetic construct
  misc_feature 1..20: note = C9Orf72 CTCN PAM targeting sequence
  source 1..20: mol_type = other RNA
tctttctctgtgagacctaa

SEQ ID NO: 16760 - RNA, 20 nt, synthetic construct
  misc_feature 1..20: note = C9Orf72 CTCN PAM targeting sequence
  source 1..20: mol_type = other RNA
gtgagacctaaagcttatga

SEQ ID NO: 16761 - RNA, 20 nt, synthetic construct
  misc_feature 1..20: note = C9Orf72 CTCN PAM targeting sequence
  source 1..20: mol_type = other RNA
cagagaaagacgaggcctca

SEQ ID NO: 16762 - RNA, 20 nt, synthetic construct
  misc_feature 1..20: note = C9Orf72 CTCN PAM targeting sequence
  source 1..20: mol_type = other RNA
ctgtcttattttgcttttaa

SEQ ID NO: 16763 - RNA, 20 nt, synthetic construct
  misc_feature 1..20: note = C9Orf72 CTCN PAM targeting sequence
  source 1..20: mol_type = other RNA
gtcttattttgcttttaatg

SEQ ID NO: 16764 - RNA, 20 nt, synthetic construct
  misc_feature 1..20: note = C9Orf72 CTCN PAM targeting sequence
  source 1..20: mol_type = other RNA
acttacccatttccatgttg

SEQ ID NO: 16765 - RNA, 20 nt, synthetic construct
  misc_feature 1..20: note = C9Orf72 CTCN PAM targeting sequence
  source 1..20: mol_type = other RNA
gaacatgcatgcagacctcc

SEQ ID NO: 16766 - RNA, 20 nt, synthetic construct
  misc_feature 1..20: note = C9Orf72 CTCN PAM targeting sequence
  source 1..20: mol_type = other RNA
tcaatacgccccttatctca

SEQ ID NO: 16767 - RNA, 20 nt, synthetic construct
  misc_feature 1..20: note = C9Orf72 CTCN PAM targeting sequence
  source 1..20: mol_type = other RNA
cttcaatacgccccttatct

SEQ ID NO: 16768 - RNA, 20 nt, synthetic construct
  misc_feature 1..20: note = C9Orf72 CTCN PAM targeting sequence
  source 1..20: mol_type = other RNA
attcaaagggattacacact

SEQ ID NO: 16769 - RNA, 20 nt, synthetic construct
  misc_feature 1..20: note = C9Orf72 CTCN PAM targeting sequence
  source 1..20: mol_type = other RNA
ccccaattcaaaaacatatt

SEQ ID NO: 16770 - RNA, 20 nt, synthetic construct
  misc_feature 1..20: note = C9Orf72 CTCN PAM targeting sequence
  source 1..20: mol_type = other RNA
ccaattcaaaaacatattaa

SEQ ID NO: 16771 - RNA, 20 nt, synthetic construct
  misc_feature 1..20: note = C9Orf72 CTCN PAM targeting sequence
  source 1..20: mol_type = other RNA
aagagttgacaatcccatgg

SEQ ID NO: 16772 - RNA, 20 nt, synthetic construct
  misc_feature 1..20: note = C9Orf72 CTCN PAM targeting sequence
  source 1..20: mol_type = other RNA
ttgagggctgggaatataaa

SEQ ID NO: 16773 - RNA, 20 nt, synthetic construct
  misc_feature 1..20: note = C9Orf72 CTCN PAM targeting sequence
  source 1..20: mol_type = other RNA
catgggattgtcaactcttt

SEQ ID NO: 16774 - RNA, 20 nt, synthetic construct
  misc_feature 1..20: note = C9Orf72 CTCN PAM targeting sequence
  source 1..20: mol_type = other RNA
tagcaaatgtagttaattgt

SEQ ID NO: 16775 - RNA, 20 nt, synthetic construct
  misc_feature 1..20: note = C9Orf72 CTCN PAM targeting sequence
  source 1..20: mol_type = other RNA
tttctgtcttaacgattgat

SEQ ID NO: 16776 - RNA, 20 nt, synthetic construct
  misc_feature 1..20: note = C9Orf72 CTCN PAM targeting sequence
  source 1..20: mol_type = other RNA
catgacctcttttctgtctt

SEQ ID NO: 16777 - RNA, 20 nt, synthetic construct
  misc_feature 1..20: note = C9Orf72 CTCN PAM targeting sequence
  source 1..20: mol_type = other RNA
cttagctaacatttcttaag

SEQ ID NO: 16778 - RNA, 20 nt, synthetic construct
  misc_feature 1..20: note = C9Orf72 CTCN PAM targeting sequence
  source 1..20: mol_type = other RNA
tattattatacccatgctat

SEQ ID NO: 16779 - RNA, 20 nt, synthetic construct
  misc_feature 1..20: note = C9Orf72 CTCN PAM targeting sequence
  source 1..20: mol_type = other RNA
tccatagcatgggtataata

SEQ ID NO: 16780 - RNA, 20 nt, synthetic construct
  misc_feature 1..20: note = C9Orf72 CTCN PAM targeting sequence
  source 1..20: mol_type = other RNA
agtttgcacgttagtaaatg

SEQ ID NO: 16781 - RNA, 20 nt, synthetic construct
  misc_feature 1..20: note = C9Orf72 CTCN PAM targeting sequence
  source 1..20: mol_type = other RNA
gtgggttccaaccctggacc

SEQ ID NO: 16782 - RNA, 20 nt, synthetic construct
  misc_feature 1..20: note = C9Orf72 CTCN PAM targeting sequence
  source 1..20: mol_type = other RNA
cctaccccagtagggtgctg

SEQ ID NO: 16783 - RNA, 20 nt, synthetic construct
  misc_feature 1..20: note = C9Orf72 CTCN PAM targeting sequence
  source 1..20: mol_type = other RNA
taccccagtagggtgctgca

SEQ ID NO: 16784 - RNA, 20 nt, synthetic construct
  misc_feature 1..20: note = C9Orf72 CTCN PAM targeting sequence
  source 1..20: mol_type = other RNA
gcacaacctgtgtggtagat

SEQ ID NO: 16785 - RNA, 20 nt, synthetic construct
  misc_feature 1..20: note = C9Orf72 CTCN PAM targeting sequence
  source 1..20: mol_type = other RNA
gtccacgtgagacaaaagca

SEQ ID NO: 16786 - RNA, 20 nt, synthetic construct
  misc_feature 1..20: note = C9Orf72 CTCN PAM targeting sequence
  source 1..20: mol_type = other RNA
cgtggactgagtatctacca

SEQ ID NO: 16787 - RNA, 20 nt, synthetic construct
  misc_feature 1..20: note = C9Orf72 CTCN PAM targeting sequence
  source 1..20: mol_type = other RNA
ttgttgcttttgtctcacgt

SEQ ID NO: 16788 - RNA, 20 nt, synthetic construct
  misc_feature 1..20: note = C9Orf72 CTCN PAM targeting sequence
  source 1..20: mol_type = other RNA
accatgcacagccacacatc

SEQ ID NO: 16789 - RNA, 20 nt, synthetic construct
  misc_feature 1..20: note = C9Orf72 CTCN PAM targeting sequence
  source 1..20: mol_type = other RNA
gccttgcctccaccatgcac

SEQ ID NO: 16790 - RNA, 20 nt, synthetic construct
  misc_feature 1..20: note = C9Orf72 CTCN PAM targeting sequence
  source 1..20: mol_type = other RNA
tctttccctctgccttgcct

SEQ ID NO: 16791 - RNA, 20 nt, synthetic construct
  misc_feature 1..20: note = C9Orf72 CTCN PAM targeting sequence
  source 1..20: mol_type = other RNA
gagttccatactgtggaatc

SEQ ID NO: 16792 - RNA, 20 nt, synthetic construct
  misc_feature 1..20: note = C9Orf72 CTCN PAM targeting sequence
  source 1..20: mol_type = other RNA
gagacccccccaccacctca

SEQ ID NO: 16793 - RNA, 20 nt, synthetic construct
  misc_feature 1..20: note = C9Orf72 CTCN PAM targeting sequence
  source 1..20: mol_type = other RNA
gggaatgccaatgttctaag

SEQ ID NO: 16794 - RNA, 20 nt, synthetic construct
  misc_feature 1..20: note = C9Orf72 CTCN PAM targeting sequence
  source 1..20: mol_type = other RNA
ttcatcatcctttgagggtc

SEQ ID NO: 16795 - RNA, 20 nt, synthetic construct
  misc_feature 1..20: note = C9Orf72 CTCN PAM targeting sequence
  source 1..20: mol_type = other RNA
aaggatgatgaaggagtcag

SEQ ID NO: 16796 - RNA, 20 nt, synthetic construct
  misc_feature 1..20: note = C9Orf72 CTCN PAM targeting sequence
  source 1..20: mol_type = other RNA
agaaatttacaatacagtct

SEQ ID NO: 16797 - RNA, 20 nt, synthetic construct
  misc_feature 1..20: note = C9Orf72 CTCN PAM targeting sequence
  source 1..20: mol_type = other RNA
caagaaatttacaatacagt

SEQ ID NO: 16798 - RNA, 20 nt, synthetic construct
  misc_feature 1..20: note = C9Orf72 CTCN PAM targeting sequence
  source 1..20: mol_type = other RNA
aaaaaaaaaaaaaagaagaa

SEQ ID NO: 16799 - RNA, 20 nt, synthetic construct
  misc_feature 1..20: note = C9Orf72 CTCN PAM targeting sequence
  source 1..20: mol_type = other RNA
gtctcaaaaaaaaaaaaaaa

SEQ ID NO: 16800 - RNA, 20 nt, synthetic construct
  misc_feature 1..20: note = C9Orf72 CTCN PAM targeting sequence
  source 1..20: mol_type = other RNA
ctcttttgcccaggccggac

SEQ ID NO: 16801 - RNA, 20 nt, synthetic construct
  misc_feature 1..20: note = C9Orf72 CTCN PAM targeting sequence
  source 1..20: mol_type = other RNA
tttgcccaggccggactgca

SEQ ID NO: 16802 - RNA, 20 nt, synthetic construct
  misc_feature 1..20: note = C9Orf72 CTCN PAM targeting sequence
  source 1..20: mol_type = other RNA
gctcactgcaagctctgcct

SEQ ID NO: 16803 - RNA, 20 nt, synthetic construct
  misc_feature 1..20: note = C9Orf72 CTCN PAM targeting sequence
  source 1..20: mol_type = other RNA
ctgcaagctctgcctcccgg

SEQ ID NO: 16804 - RNA, 20 nt, synthetic construct
  misc_feature 1..20: note = C9Orf72 CTCN PAM targeting sequence
  source 1..20: mol_type = other RNA
gcctcccgggttcacgccat

SEQ ID NO: 16805 - RNA, 20 nt, synthetic construct
  misc_feature 1..20: note = C9Orf72 CTCN PAM targeting sequence
  source 1..20: mol_type = other RNA
cgggttcacgccattctcct

SEQ ID NO: 16806 - RNA, 20 nt, synthetic construct
  misc_feature 1..20: note = C9Orf72 CTCN PAM targeting sequence
  source 1..20: mol_type = other RNA
tgcctcagcctcccgagtgg

SEQ ID NO: 16807 - RNA, 20 nt, synthetic construct
  misc_feature 1..20: note = C9Orf72 CTCN PAM targeting sequence
  source 1..20: mol_type = other RNA
gcctcccgagtggctgggac

SEQ ID NO: 16808 - RNA, 20 nt, synthetic construct
  misc_feature 1..20: note = C9Orf72 CTCN PAM targeting sequence
  source 1..20: mol_type = other RNA
cgagtggctgggactacagg

SEQ ID NO: 16809 - RNA, 20 nt, synthetic construct
  misc_feature 1..20: note = C9Orf72 CTCN PAM targeting sequence
  source 1..20: mol_type = other RNA
ggaggctgaggcaggagaat

SEQ ID NO: 16810 - RNA, 20 nt, synthetic construct
  misc_feature 1..20: note = C9Orf72 CTCN PAM targeting sequence
  source 1..20: mol_type = other RNA
acgaaaaatacaaaaaaaaa

SEQ ID NO: 16811 - RNA, 20 nt, synthetic construct
  misc_feature 1..20: note = C9Orf72 CTCN PAM targeting sequence
  source 1..20: mol_type = other RNA
atctcctgacctcgtgatct

SEQ ID NO: 16812 - RNA, 20 nt, synthetic construct
  misc_feature 1..20: note = C9Orf72 CTCN PAM targeting sequence
  source 1..20: mol_type = other RNA
tgacctcgtgatctgcctgc

SEQ ID NO: 16813 - RNA, 20 nt, synthetic construct
  misc_feature 1..20: note = C9Orf72 CTCN PAM targeting sequence
  source 1..20: mol_type = other RNA
tgatctgcctgcctcgagag

SEQ ID NO: 16814 - RNA, 20 nt, synthetic construct
  misc_feature 1..20: note = C9Orf72 CTCN PAM targeting sequence
  source 1..20: mol_type = other RNA
agagcatagattttttatgc

SEQ ID NO: 16815 - RNA, 20 nt, synthetic construct
  misc_feature 1..20: note = C9Orf72 CTCN PAM targeting sequence
  source 1..20: mol_type = other RNA
aggcaggcagatcacgaggt

SEQ ID NO: 16816 - RNA, 20 nt, synthetic construct
  misc_feature 1..20: note = C9Orf72 CTCN PAM targeting sequence
  source 1..20: mol_type = other RNA
cgaggcaggcagatcacgag

SEQ ID NO: 16817 - RNA, 20 nt, synthetic construct
  misc_feature 1..20: note = C9Orf72 CTCN PAM targeting sequence
  source 1..20: mol_type = other RNA
gatattctatgtgcataaaa

SEQ ID NO: 16818 - RNA, 20 nt, synthetic construct
  misc_feature 1..20: note = C9Orf72 CTCN PAM targeting sequence
  source 1..20: mol_type = other RNA
agttgctcagatattctatg

SEQ ID NO: 16819 - RNA, 20 nt, synthetic construct
  misc_feature 1..20: note = C9Orf72 CTCN PAM targeting sequence
  source 1..20: mol_type = other RNA
atatatacaactcaagttgc

SEQ ID NO: 16820 - RNA, 20 nt, synthetic construct
  misc_feature 1..20: note = C9Orf72 CTCN PAM targeting sequence
  source 1..20: mol_type = other RNA
taatggacactgcatgtgct

SEQ ID NO: 16821 - RNA, 20 nt, synthetic construct
  misc_feature 1..20: note = C9Orf72 CTCN PAM targeting sequence
  source 1..20: mol_type = other RNA
ggatacttagcacatgcagt

SEQ ID NO: 16822 - RNA, 20 nt, synthetic construct
  misc_feature 1..20: note = C9Orf72 CTCN PAM targeting sequence
  source 1..20: mol_type = other RNA
gaaacattcttaatatctat

SEQ ID NO: 16823 - RNA, 20 nt, synthetic construct
  misc_feature 1..20: note = C9Orf72 CTCN PAM targeting sequence
  source 1..20: mol_type = other RNA
attaaactgttaaaaatgtc

SEQ ID NO: 16824 - RNA, 20 nt, synthetic construct
  misc_feature 1..20: note = C9Orf72 CTCN PAM targeting sequence
  source 1..20: mol_type = other RNA
caggcccccaaagaggccct

SEQ ID NO: 16825 - RNA, 20 nt, synthetic construct
  misc_feature 1..20: note = C9Orf72 CTCN PAM targeting sequence
  source 1..20: mol_type = other RNA
ttgggggcctgggagaaaat

SEQ ID NO: 16826 - RNA, 20 nt, synthetic construct
  misc_feature 1..20: note = C9Orf72 CTCN PAM targeting sequence
  source 1..20: mol_type = other RNA
aacatgtcaatatcctagac

SEQ ID NO: 16827 - RNA, 20 nt, synthetic construct
  misc_feature 1..20: note = C9Orf72 CTCN PAM targeting sequence
  source 1..20: mol_type = other RNA
gagacttcaagttagttcct

SEQ ID NO: 16828 - RNA, 20 nt, synthetic construct
  misc_feature 1..20: note = C9Orf72 CTCN PAM targeting sequence
  source 1..20: mol_type = other RNA
gagtcacagaatggcctcaa

SEQ ID NO: 16829 - RNA, 20 nt, synthetic construct
  misc_feature 1..20: note = C9Orf72 CTCN PAM targeting sequence
  source 1..20: mol_type = other RNA
aaggcagtgccaggaactaa

SEQ ID NO: 16830 - RNA, 20 nt, synthetic construct
  misc_feature 1..20: note = C9Orf72 CTCN PAM targeting sequence
  source 1..20: mol_type = other RNA
gttattttctataattgaag

SEQ ID NO: 16831 - RNA, 20 nt, synthetic construct
  misc_feature 1..20: note = C9Orf72 CTCN PAM targeting sequence
  source 1..20: mol_type = other RNA
acttgataacttacactcag

SEQ ID NO: 16832 - RNA, 20 nt, synthetic construct
  misc_feature 1..20: note = C9Orf72 CTCN PAM targeting sequence
  source 1..20: mol_type = other RNA
gctttttcctacaatgttgt

SEQ ID NO: 16833 - RNA, 20 nt, synthetic construct
  misc_feature 1..20: note = C9Orf72 CTCN PAM targeting sequence
  source 1..20: mol_type = other RNA
tttatgcctgaaagcataaa

SEQ ID NO: 16834 - RNA, 20 nt, synthetic construct
  misc_feature 1..20: note = C9Orf72 CTCN PAM targeting sequence
  source 1..20: mol_type = other RNA
gtcgtggtgtttctgatccc

SEQ ID NO: 16835 - RNA, 20 nt, synthetic construct
  misc_feature 1..20: note = C9Orf72 CTCN PAM targeting sequence
  source 1..20: mol_type = other RNA
gtgaaaccaaaagtgtgagt

SEQ ID NO: 16836 - RNA, 20 nt, synthetic construct
  misc_feature 1..20: note = C9Orf72 CTCN PAM targeting sequence
  source 1..20: mol_type = other RNA
cacttttggtttcacagagc

SEQ ID NO: 16837 - RNA, 20 nt, synthetic construct
  misc_feature 1..20: note = C9Orf72 CTCN PAM targeting sequence
  source 1..20: mol_type = other RNA
tccttcttgtgggcctttgg

SEQ ID NO: 16838 - RNA, 20 nt, synthetic construct
  misc_feature 1..20: note = C9Orf72 CTCN PAM targeting sequence
  source 1..20: mol_type = other RNA
aaaggcccacaagaaggaag

SEQ ID NO: 16839 - RNA, 20 nt, synthetic construct
  misc_feature 1..20: note = C9Orf72 CTCN PAM targeting sequence
  source 1..20: mol_type = other RNA
tctatagtcatgttcaggtc

SEQ ID NO: 16840 - RNA, 20 nt, synthetic construct
  misc_feature 1..20: note = C9Orf72 CTCN PAM targeting sequence
  source 1..20: mol_type = other RNA
tggatggtttcagttcagtt

SEQ ID NO: 16841 - RNA, 20 nt, synthetic construct
  misc_feature 1..20: note = C9Orf72 CTCN PAM targeting sequence
  source 1..20: mol_type = other RNA
ctgtccttgacattttctga

SEQ ID NO: 16842 - RNA, 20 nt, synthetic construct
  misc_feature 1..20: note = C9Orf72 CTCN PAM targeting sequence
  source 1..20: mol_type = other RNA
gtccttgacattttctgaaa

SEQ ID NO: 16843 - RNA, 20 nt, synthetic construct
  misc_feature 1..20: note = C9Orf72 CTCN PAM targeting sequence
  source 1..20: mol_type = other RNA
cttgagctgtttgcacaacc

SEQ ID NO: 16844 - RNA, 20 nt, synthetic construct
  misc_feature 1..20: note = C9Orf72 CTCN PAM targeting sequence
  source 1..20: mol_type = other RNA
agggagttaagactagaaac

SEQ ID NO: 16845 - RNA, 20 nt, synthetic construct
  misc_feature 1..20: note = C9Orf72 CTCN PAM targeting sequence
  source 1..20: mol_type = other RNA
gccatcgatgaattctttcc

SEQ ID NO: 16846 - RNA, 20 nt, synthetic construct
  misc_feature 1..20: note = C9Orf72 CTCN PAM targeting sequence
  source 1..20: mol_type = other RNA
gaatgcagttggacaaatag

SEQ ID NO: 16847 - RNA, 20 nt, synthetic construct
  misc_feature 1..20: note = C9Orf72 CTCN PAM targeting sequence
  source 1..20: mol_type = other RNA
gttcctgcccctgagagcct

SEQ ID NO: 16848 - RNA, 20 nt, synthetic construct
  misc_feature 1..20: note = C9Orf72 CTCN PAM targeting sequence
  source 1..20: mol_type = other RNA
ggggcaggaaccgagttgtc

SEQ ID NO: 16849 - RNA, 20 nt, synthetic construct
  misc_feature 1..20: note = C9Orf72 CTCN PAM targeting sequence
  source 1..20: mol_type = other RNA
caggggcaggaaccgagttg

SEQ ID NO: 16850 - RNA, 20 nt, synthetic construct
  misc_feature 1..20: note = C9Orf72 CTCN PAM targeting sequence
  source 1..20: mol_type = other RNA
tgtgaaagaaaatgaagaaa

SEQ ID NO: 16851 - RNA, 20 nt, synthetic construct
  misc_feature 1..20: note = C9Orf72 CTCN PAM targeting sequence
  source 1..20: mol_type = other RNA
ttttaaagtaaagatgtgag

SEQ ID NO: 16852 - RNA, 20 nt, synthetic construct
  misc_feature 1..20: note = C9Orf72 CTCN PAM targeting sequence
  source 1..20: mol_type = other RNA
catctttactttaaaaagag

SEQ ID NO: 16853 - RNA, 20 nt, synthetic construct
  misc_feature 1..20: note = C9Orf72 CTCN PAM targeting sequence
  source 1..20: mol_type = other RNA
agtgtaacccaaaaagtctt

SEQ ID NO: 16854 - RNA, 20 nt, synthetic construct
  misc_feature 1..20: note = C9Orf72 CTCN PAM targeting sequence
  source 1..20: mol_type = other RNA
gtagtcctggaacaaagcaa

SEQ ID NO: 16855 - RNA, 20 nt, synthetic construct
  misc_feature 1..20: note = C9Orf72 CTCN PAM targeting sequence
  source 1..20: mol_type = other RNA
cagcagaataataaatttca

SEQ ID NO: 16856 - RNA, 20 nt, synthetic construct
  misc_feature 1..20: note = C9Orf72 CTCN PAM targeting sequence
  source 1..20: mol_type = other RNA
aacatcaaaggggccttgtt

SEQ ID NO: 16857 - RNA, 20 nt, synthetic construct
  misc_feature 1..20: note = C9Orf72 CTCN PAM targeting sequence
  source 1..20: mol_type = other RNA
aggatcaacaaggccccttt

SEQ ID NO: 16858 - RNA, 20 nt, synthetic construct
  misc_feature 1..20: note = C9Orf72 CTCN PAM targeting sequence
  source 1..20: mol_type = other RNA
cagagctagccaattcctag

SEQ ID NO: 16859 - RNA, 20 nt, synthetic construct
  misc_feature 1..20: note = C9Orf72 CTCN PAM targeting sequence
  source 1..20: mol_type = other RNA
gggaggggcagtccctccag

SEQ ID NO: 16860 - RNA, 20 nt, synthetic construct
  misc_feature 1..20: note = C9Orf72 CTCN PAM targeting sequence
  source 1..20: mol_type = other RNA
agctgtttacacaacaacca

SEQ ID NO: 16861 - RNA, 20 nt, synthetic construct
  misc_feature 1..20: note = C9Orf72 CTCN PAM targeting sequence
  source 1..20: mol_type = other RNA
gcaggattggtttgtattgg

SEQ ID NO: 16862 - RNA, 20 nt, synthetic construct
  misc_feature 1..20: note = C9Orf72 CTCN PAM targeting sequence
  source 1..20: mol_type = other RNA
tccatcagggtctcacacta

SEQ ID NO: 16863 - RNA, 20 nt, synthetic construct
  misc_feature 1..20: note = C9Orf72 CTCN PAM targeting sequence
  source 1..20: mol_type = other RNA
atcagggtctcacactaacc

SEQ ID NO: 16864 - RNA, 20 nt, synthetic construct
  misc_feature 1..20: note = C9Orf72 CTCN PAM targeting sequence
  source 1..20: mol_type = other RNA
cactaaccaccccaggccaa

SEQ ID NO: 16865 - RNA, 20 nt, synthetic construct
  misc_feature 1..20: note = C9Orf72 CTCN PAM targeting sequence
  source 1..20: mol_type = other RNA
agagattattcaaattagcc

SEQ ID NO: 16866 - RNA, 20 nt, synthetic construct
  misc_feature 1..20: note = C9Orf72 CTCN PAM targeting sequence
  source 1..20: mol_type = other RNA
ggagcctaggggttattcct

SEQ ID NO: 16867 - RNA, 20 nt, synthetic construct
  misc_feature 1..20: note = C9Orf72 CTCN PAM targeting sequence
  source 1..20: mol_type = other RNA
agctttctctgctccctcag

SEQ ID NO: 16868 - RNA, 20 nt, synthetic construct
  misc_feature 1..20: note = C9Orf72 CTCN PAM targeting sequence
  source 1..20: mol_type = other RNA
gctccctcagtctccggact

SEQ ID NO: 16869 - RNA, 20 nt, synthetic construct
  misc_feature 1..20: note = C9Orf72 CTCN PAM targeting sequence
  source 1..20: mol_type = other RNA
ctcagtctccggactaacct

SEQ ID NO: 16870 - RNA, 20 nt, synthetic construct
  misc_feature 1..20: note = C9Orf72 CTCN PAM targeting sequence
  source 1..20: mol_type = other RNA
gtctccggactaacctgggg

SEQ ID NO: 16871 - RNA, 20 nt, synthetic construct
  misc_feature 1..20: note = C9Orf72 CTCN PAM targeting sequence
  source 1..20: mol_type = other RNA
gaacaaagggactgtgttat

SEQ ID NO: 16872 - RNA, 20 nt, synthetic construct
  misc_feature 1..20: note = C9Orf72 CTCN PAM targeting sequence
  source 1..20: mol_type = other RNA
tttctgattcaattttgatc

SEQ ID NO: 16873 - RNA, 20 nt, synthetic construct
  misc_feature 1..20: note = C9Orf72 CTCN PAM targeting sequence
  source 1..20: mol_type = other RNA
tgtttgggggaggcaaaaaa

SEQ ID NO: 16874 - RNA, 20 nt, synthetic construct
  misc_feature 1..20: note = C9Orf72 CTCN PAM targeting sequence
  source 1..20: mol_type = other RNA
cccaaacaggagatgatgga

SEQ ID NO: 16875 - RNA, 20 nt, synthetic construct
  misc_feature 1..20: note = C9Orf72 CTCN PAM targeting sequence
  source 1..20: mol_type = other RNA
tgatatatatagtcctggca

SEQ ID NO: 16876 - RNA, 20 nt, synthetic construct
  misc_feature 1..20: note = C9Orf72 CTCN PAM targeting sequence
  source 1..20: mol_type = other RNA
ccaaaagcaacatgcagcct

SEQ ID NO: 16877 - RNA, 20 nt, synthetic construct
  misc_feature 1..20: note = C9Orf72 CTCN PAM targeting sequence
  source 1..20: mol_type = other RNA
tctccccaaaagcaacatgc

SEQ ID NO: 16878 - RNA, 20 nt, synthetic construct
  misc_feature 1..20: note = C9Orf72 CTCN PAM targeting sequence
  source 1..20: mol_type = other RNA
ttgcaaagttttctcttctc

SEQ ID NO: 16879 - RNA, 20 nt, synthetic construct
  misc_feature 1..20: note = C9Orf72 CTCN PAM targeting sequence
  source 1..20: mol_type = other RNA
gaaactttctttttatcatt

SEQ ID NO: 16880 - RNA, 20 nt, synthetic construct
  misc_feature 1..20: note = C9Orf72 CTCN PAM targeting sequence
  source 1..20: mol_type = other RNA
ttttttttttttttttttca

SEQ ID NO: 16881 - RNA, 20 nt, synthetic construct
  misc_feature 1..20: note = C9Orf72 CTCN PAM targeting sequence
  source 1..20: mol_type = other RNA
ctacctgaaaaaaaaaaaaa

SEQ ID NO: 16882 - RNA, 20 nt, synthetic construct
  misc_feature 1..20: note = C9Orf72 CTCN PAM targeting sequence
  source 1..20: mol_type = other RNA
cactacctgaaaaaaaaaaa

SEQ ID NO: 16883 - RNA, 20 nt, synthetic construct
  misc_feature 1..20: note = C9Orf72 CTCN PAM targeting sequence
  source 1..20: mol_type = other RNA
gaaagttaatgccagacaac

SEQ ID NO: 16884 - RNA, 20 nt, synthetic construct
  misc_feature 1..20: note = C9Orf72 CTCN PAM targeting sequence
  source 1..20: mol_type = other RNA
aaacccttaagatatacaat

SEQ ID NO: 16885 - RNA, 20 nt, synthetic construct
  misc_feature 1..20: note = C9Orf72 CTCN PAM targeting sequence
  source 1..20: mol_type = other RNA
aagtgatttgcaatcaataa

SEQ ID NO: 16886 - RNA, 20 nt, synthetic construct
  misc_feature 1..20: note = C9Orf72 CTCN PAM targeting sequence
  source 1..20: mol_type = other RNA
attattgattgcaaatcact

SEQ ID NO: 16887 - RNA, 20 nt, synthetic construct
  misc_feature 1..20: note = C9Orf72 CTCN PAM targeting sequence
  source 1..20: mol_type = other RNA
gaacatgcccttctctctat

SEQ ID NO: 16888 - RNA, 20 nt, synthetic construct
  misc_feature 1..20: note = C9Orf72 CTCN PAM targeting sequence
  source 1..20: mol_type = other RNA
ctatcctaccctgagctacc

SEQ ID NO: 16889 - RNA, 20 nt, synthetic construct
  misc_feature 1..20: note = C9Orf72 CTCN PAM targeting sequence
  source 1..20: mol_type = other RNA
atcctaccctgagctaccac

SEQ ID NO: 16890 - RNA, 20 nt, synthetic construct
  misc_feature 1..20: note = C9Orf72 CTCN PAM targeting sequence
  source 1..20: mol_type = other RNA
gggtaggatagagagaaggg

SEQ ID NO: 16891 - RNA, 20 nt, synthetic construct
  misc_feature 1..20: note = C9Orf72 CTCN PAM targeting sequence
  source 1..20: mol_type = other RNA
tagcttaaaagctggaaaat

SEQ ID NO: 16892 - RNA, 20 nt, synthetic construct
  misc_feature 1..20: note = C9Orf72 CTCN PAM targeting sequence
  source 1..20: mol_type = other RNA
aagaagttggcccacattga

SEQ ID NO: 16893 - RNA, 20 nt, synthetic construct
  misc_feature 1..20: note = C9Orf72 CTCN PAM targeting sequence
  source 1..20: mol_type = other RNA
atgtgggccaacttcttgga

SEQ ID NO: 16894 - RNA, 20 nt, synthetic construct
  misc_feature 1..20: note = C9Orf72 CTCN PAM targeting sequence
  source 1..20: mol_type = other RNA
acagagaggggatggatatc

SEQ ID NO: 16895 - RNA, 20 nt, synthetic construct
  misc_feature 1..20: note = C9Orf72 CTCN PAM targeting sequence
  source 1..20: mol_type = other RNA
gtggagcactagtctgaaca

SEQ ID NO: 16896 - RNA, 20 nt, synthetic construct
  misc_feature 1..20: note = C9Orf72 CTCN PAM targeting sequence
  source 1..20: mol_type = other RNA
ctgtggagcactagtctgaa

SEQ ID NO: 16897 - RNA, 20 nt, synthetic construct
  misc_feature 1..20: note = C9Orf72 CTCN PAM targeting sequence
  source 1..20: mol_type = other RNA
atttcagtactggtccgttt

SEQ ID NO: 16898 - RNA, 20 nt, synthetic construct
  misc_feature 1..20: note = C9Orf72 CTCN PAM targeting sequence
  source 1..20: mol_type = other RNA
ttaactccatttcagtactg

SEQ ID NO: 16899 - RNA, 20 nt, synthetic construct
  misc_feature 1..20: note = C9Orf72 CTCN PAM targeting sequence
  source 1..20: mol_type = other RNA
gctggccctgtttcaggctc

SEQ ID NO: 16900 - RNA, 20 nt, synthetic construct
  misc_feature 1..20: note = C9Orf72 CTCN PAM targeting sequence
  source 1..20: mol_type = other RNA
agttttggagtgcgccgagg

SEQ ID NO: 16901 - RNA, 20 nt, synthetic construct
  misc_feature 1..20: note = C9Orf72 CTCN PAM targeting sequence
  source 1..20: mol_type = other RNA
aaaacttgagctcagctggc

SEQ ID NO: 16902 - RNA, 20 nt, synthetic construct
  misc_feature 1..20: note = C9Orf72 CTCN PAM targeting sequence
  source 1..20: mol_type = other RNA
gcgcactccaaaacttgagc

SEQ ID NO: 16903 - RNA, 20 nt, synthetic construct
  misc_feature 1..20: note = C9Orf72 CTCN PAM targeting sequence
  source 1..20: mol_type = other RNA
gcttaggcatgttgcctcgg

SEQ ID NO: 16904 - RNA, 20 nt, synthetic construct
  misc_feature 1..20: note = C9Orf72 CTCN PAM targeting sequence
  source 1..20: mol_type = other RNA
tgctagaaacttgtatcagt

SEQ ID NO: 16905 - RNA, 20 nt, synthetic construct
  misc_feature 1..20: note = C9Orf72 CTCN PAM targeting sequence
  source 1..20: mol_type = other RNA
ccagttagactcaaagcaag

SEQ ID NO: 16906 - RNA, 20 nt, synthetic construct
  misc_feature 1..20: note = C9Orf72 CTCN PAM targeting sequence
  source 1..20: mol_type = other RNA
aagcaagactagagttttct

SEQ ID NO: 16907 - RNA, 20 nt, synthetic construct
  misc_feature 1..20: note = C9Orf72 CTCN PAM targeting sequence
  source 1..20: mol_type = other RNA
agtcttgctttgagtctaac

SEQ ID NO: 16908 - RNA, 20 nt, synthetic construct
  misc_feature 1..20: note = C9Orf72 CTCN PAM targeting sequence
  source 1..20: mol_type = other RNA
gaaaactctagtcttgcttt

SEQ ID NO: 16909 - RNA, 20 nt, synthetic construct
  misc_feature 1..20: note = C9Orf72 CTCN PAM targeting sequence
  source 1..20: mol_type = other RNA
ttagcctaattgctcagaaa

SEQ ID NO: 16910 - RNA, 20 nt, synthetic construct
  misc_feature 1..20: note = C9Orf72 CTCN PAM targeting sequence
  source 1..20: mol_type = other RNA
tccttagcctaattgctcag

SEQ ID NO: 16911 - RNA, 20 nt, synthetic construct
  misc_feature 1..20: note = C9Orf72 CTCN PAM targeting sequence
  source 1..20: mol_type = other RNA
ccccagcaccctggcctgcc

SEQ ID NO: 16912 - RNA, 20 nt, synthetic construct
  misc_feature 1..20: note = C9Orf72 CTCN PAM targeting sequence
  source 1..20: mol_type = other RNA
accctcaccccagcaccctg

SEQ ID NO: 16913 - RNA, 20 nt, synthetic construct
  misc_feature 1..20: note = C9Orf72 CTCN PAM targeting sequence
  source 1..20: mol_type = other RNA
ccaccctcaccccagcaccc

SEQ ID NO: 16914 - RNA, 20 nt, synthetic construct
  misc_feature 1..20: note = C9Orf72 CTCN PAM targeting sequence
  source 1..20: mol_type = other RNA
ttactctccaccctcacccc

SEQ ID NO: 16915 - RNA, 20 nt, synthetic construct
  misc_feature 1..20: note = C9Orf72 CTCN PAM targeting sequence
  source 1..20: mol_type = other RNA
ccttactctccaccctcacc

SEQ ID NO: 16916 - RNA, 20 nt, synthetic construct
  misc_feature 1..20: note = C9Orf72 CTCN PAM targeting sequence
  source 1..20: mol_type = other RNA
aggcctgcactctccttact

SEQ ID NO: 16917 - RNA, 20 nt, synthetic construct
  misc_feature 1..20: note = C9Orf72 CTCN PAM targeting sequence
  source 1..20: mol_type = other RNA
cttgaaggcctgatgagaca

SEQ ID NO: 16918 - RNA, 20 nt, synthetic construct
  misc_feature 1..20: note = C9Orf72 CTCN PAM targeting sequence
  source 1..20: mol_type = other RNA
tgaaggcctgatgagacagc

SEQ ID NO: 16919 - RNA, 20 nt, synthetic construct
  misc_feature 1..20: note = C9Orf72 CTCN PAM targeting sequence
  source 1..20: mol_type = other RNA
tcaggccttcaagagagact

SEQ ID NO: 16920 - RNA, 20 nt, synthetic construct
  misc_feature 1..20: note = C9Orf72 CTCN PAM targeting sequence
  source 1..20: mol_type = other RNA
gttgctcatgaagccttggt

SEQ ID NO: 16921 - RNA, 20 nt, synthetic construct
  misc_feature 1..20: note = C9Orf72 CTCN PAM targeting sequence
  source 1..20: mol_type = other RNA
tgaagccttggtactcagtc

SEQ ID NO: 16922 - RNA, 20 nt, synthetic construct
  misc_feature 1..20: note = C9Orf72 CTCN PAM targeting sequence
  source 1..20: mol_type = other RNA
gtcaggaacccgcatctgac

SEQ ID NO: 16923 - RNA, 20 nt, synthetic construct
  misc_feature 1..20: note = C9Orf72 CTCN PAM targeting sequence
  source 1..20: mol_type = other RNA
gtcagatgcgggttcctgac

SEQ ID NO: 16924 - RNA, 20 nt, synthetic construct
  misc_feature 1..20: note = C9Orf72 CTCN PAM targeting sequence
  source 1..20: mol_type = other RNA
gcagggctctgtcagatgcg

SEQ ID NO: 16925 - RNA, 20 nt, synthetic construct
  misc_feature 1..20: note = C9Orf72 CTCN PAM targeting sequence
  source 1..20: mol_type = other RNA
aagccacattcagtgtgaga

SEQ ID NO: 16926 - RNA, 20 nt, synthetic construct
  misc_feature 1..20: note = C9Orf72 CTCN PAM targeting sequence
  source 1..20: mol_type = other RNA
cactgaatgtggcttggaga

SEQ ID NO: 16927 - RNA, 20 nt, synthetic construct
  misc_feature 1..20: note = C9Orf72 CTCN PAM targeting sequence
  source 1..20: mol_type = other RNA
cacactgaatgtggcttgga

SEQ ID NO: 16928 - RNA, 20 nt, synthetic construct
  misc_feature 1..20: note = C9Orf72 CTCN PAM targeting sequence
  source 1..20: mol_type = other RNA
atttagctctcacactgaat

SEQ ID NO: 16929 - RNA, 20 nt, synthetic construct
  misc_feature 1..20: note = C9Orf72 CTCN PAM targeting sequence
  source 1..20: mol_type = other RNA
gaggccccatgcagatttgc

SEQ ID NO: 16930 - RNA, 20 nt, synthetic construct
  misc_feature 1..20: note = C9Orf72 CTCN PAM targeting sequence
  source 1..20: mol_type = other RNA
gagaaattattacgtttcat

SEQ ID NO: 16931 - RNA, 20 nt, synthetic construct
  misc_feature 1..20: note = C9Orf72 CTCN PAM targeting sequence
  source 1..20: mol_type = other RNA
gccttaggaaatctcctttc

SEQ ID NO: 16932 - RNA, 20 nt, synthetic construct
  misc_feature 1..20: note = C9Orf72 CTCN PAM targeting sequence
  source 1..20: mol_type = other RNA
tttctccccaagaaaattta

SEQ ID NO: 16933 - RNA, 20 nt, synthetic construct
  misc_feature 1..20: note = C9Orf72 CTCN PAM targeting sequence
  source 1..20: mol_type = other RNA
ccaagaaaatttaataaaaa

SEQ ID NO: 16934 - RNA, 20 nt, synthetic construct
  misc_feature 1..20: note = C9Orf72 CTCN PAM targeting sequence
  source 1..20: mol_type = other RNA
ttccctcctgcccctccctt

SEQ ID NO: 16935 - RNA, 20 nt, synthetic construct
  misc_feature 1..20: note = C9Orf72 CTCN PAM targeting sequence
  source 1..20: mol_type = other RNA
tgcccctcccttccactaag

SEQ ID NO: 16936 - RNA, 20 nt, synthetic construct
  misc_feature 1..20: note = C9Orf72 CTCN PAM targeting sequence
  source 1..20: mol_type = other RNA
cttccactaagccctcaaac

SEQ ID NO: 16937 - RNA, 20 nt, synthetic construct
  misc_feature 1..20: note = C9Orf72 CTCN PAM targeting sequence
  source 1..20: mol_type = other RNA
aacatctcattcaatccttc

SEQ ID NO: 16938 - RNA, 20 nt, synthetic construct
  misc_feature 1..20: note = C9Orf72 CTCN PAM targeting sequence
  source 1..20: mol_type = other RNA
ttcaatccttccttttcagg

SEQ ID NO: 16939 - RNA, 20 nt, synthetic construct
  misc_feature 1..20: note = C9Orf72 CTCN PAM targeting sequence
  source 1..20: mol_type = other RNA
gaaagaaaataagttgccta

SEQ ID NO: 16940 - RNA, 20 nt, synthetic construct
  misc_feature 1..20: note = C9Orf72 CTCN PAM targeting sequence
  source 1..20: mol_type = other RNA
ataacaagataaaataagta

SEQ ID NO: 16941 - RNA, 20 nt, synthetic construct
  misc_feature 1..20: note = C9Orf72 CTCN PAM targeting sequence
  source 1..20: mol_type = other RNA
tttagaatatgcagaaatgc

SEQ ID NO: 16942 - RNA, 20 nt, synthetic construct
  misc_feature 1..20: note = C9Orf72 CTCN PAM targeting sequence
  source 1..20: mol_type = other RNA
tggaccttcgtcaaccgaag

SEQ ID NO: 16943 - RNA, 20 nt, synthetic construct
  misc_feature 1..20: note = C9Orf72 CTCN PAM targeting sequence
  source 1..20: mol_type = other RNA
gaacacacatccccaccccc

SEQ ID NO: 16944 - RNA, 20 nt, synthetic construct
  misc_feature 1..20: note = C9Orf72 CTCN PAM targeting sequence
  source 1..20: mol_type = other RNA
tccaaagaaaagggaaaatg

SEQ ID NO: 16945 - RNA, 20 nt, synthetic construct
  misc_feature 1..20: note = C9Orf72 CTCN PAM targeting sequence
  source 1..20: mol_type = other RNA
ttcccaggtgttggcctttc

SEQ ID NO: 16946 - RNA, 20 nt, synthetic construct
  misc_feature 1..20: note = C9Orf72 CTCN PAM targeting sequence
  source 1..20: mol_type = other RNA
gatctgtgatcggtgctggg

SEQ ID NO: 16947 - RNA, 20 nt, synthetic construct
  misc_feature 1..20: note = C9Orf72 CTCN PAM targeting sequence
  source 1..20: mol_type = other RNA
tcagaccacaaaagcccagg

SEQ ID NO: 16948 - RNA, 20 nt, synthetic construct
  misc_feature 1..20: note = C9Orf72 CTCN PAM targeting sequence
  source 1..20: mol_type = other RNA
ggggatactggagaactgcc

SEQ ID NO: 16949 - RNA, 20 nt, synthetic construct
  misc_feature 1..20: note = C9Orf72 CTCN PAM targeting sequence
  source 1..20: mol_type = other RNA
agtatccccagagacaacct

SEQ ID NO: 16950 - RNA, 20 nt, synthetic construct
  misc_feature 1..20: note = C9Orf72 CTCN PAM targeting sequence
  source 1..20: mol_type = other RNA
agttctgcaaacaactggca

SEQ ID NO: 16951 - RNA, 20 nt, synthetic construct
  misc_feature 1..20: note = C9Orf72 CTCN PAM targeting sequence
  source 1..20: mol_type = other RNA
ataaaggggcctatctgcca

SEQ ID NO: 16952 - RNA, 20 nt, synthetic construct
  misc_feature 1..20: note = C9Orf72 CTCN PAM targeting sequence
  source 1..20: mol_type = other RNA
tctttctttagagcttggct

SEQ ID NO: 16953 - RNA, 20 nt, synthetic construct
  misc_feature 1..20: note = C9Orf72 CTCN PAM targeting sequence
  source 1..20: mol_type = other RNA
aaagaaagaagaggcagtaa

SEQ ID NO: 16954 - RNA, 20 nt, synthetic construct
  misc_feature 1..20: note = C9Orf72 CTCN PAM targeting sequence
  source 1..20: mol_type = other RNA
gtgtctcccatcatccgcag

SEQ ID NO: 16955 - RNA, 20 nt, synthetic construct
  misc_feature 1..20: note = C9Orf72 CTCN PAM targeting sequence
  source 1..20: mol_type = other RNA
catcatccgcagacccagct

SEQ ID NO: 16956 - RNA, 20 nt, synthetic construct
  misc_feature 1..20: note = C9Orf72 CTCN PAM targeting sequence
  source 1..20: mol_type = other RNA
tgaaattttcctgcatagat

SEQ ID NO: 16957 - RNA, 20 nt, synthetic construct
  misc_feature 1..20: note = C9Orf72 CTCN PAM targeting sequence
  source 1..20: mol_type = other RNA
cacagatacatgtggaatta

SEQ ID NO: 16958 - RNA, 20 nt, synthetic construct
  misc_feature 1..20: note = C9Orf72 CTCN PAM targeting sequence
  source 1..20: mol_type = other RNA
gcttcaggtctgttacctgc

SEQ ID NO: 16959 - RNA, 20 nt, synthetic construct
  misc_feature 1..20: note = C9Orf72 CTCN PAM targeting sequence
  source 1..20: mol_type = other RNA
agactggccactctgtgaga

SEQ ID NO: 16960 - RNA, 20 nt, synthetic construct
  misc_feature 1..20: note = C9Orf72 CTCN PAM targeting sequence
  source 1..20: mol_type = other RNA
gtgagagcagggacggtgtc

SEQ ID NO: 16961 - RNA, 20 nt, synthetic construct
  misc_feature 1..20: note = C9Orf72 CTCN PAM targeting sequence
  source 1..20: mol_type = other RNA
cagagtggccagtctggagc

SEQ ID NO: 16962 - RNA, 20 nt, synthetic construct
  misc_feature 1..20: note = C9Orf72 CTCN PAM targeting sequence
  source 1..20: mol_type = other RNA
cacagagtggccagtctgga

SEQ ID NO: 16963 - RNA, 20 nt, synthetic construct
  misc_feature 1..20: note = C9Orf72 CTCN PAM targeting sequence
  source 1..20: mol_type = other RNA
tcacaagtgtctccttagtg

SEQ ID NO: 16964 - RNA, 20 nt, synthetic construct
  misc_feature 1..20: note = C9Orf72 CTCN PAM targeting sequence
  source 1..20: mol_type = other RNA
caagtgtctccttagtgacg

SEQ ID NO: 16965 - RNA, 20 nt, synthetic construct
  misc_feature 1..20: note = C9Orf72 CTCN PAM targeting sequence
  source 1..20: mol_type = other RNA
ttagtgacgtctccttagtg

SEQ ID NO: 16966 - RNA, 20 nt, synthetic construct
  misc_feature 1..20: note = C9Orf72 CTCN PAM targeting sequence
  source 1..20: mol_type = other RNA
ttagtggcctggcacctgga

SEQ ID NO: 16967 - RNA, 20 nt, synthetic construct
  misc_feature 1..20: note = C9Orf72 CTCN PAM targeting sequence
  source 1..20: mol_type = other RNA
aggtgccaggccactaagga

SEQ ID NO: 16968 - RNA, 20 nt, synthetic construct
  misc_feature 1..20: note = C9Orf72 CTCN PAM targeting sequence
  source 1..20: mol_type = other RNA
ttccaacggtcagcaagtat

SEQ ID NO: 16969 - RNA, 20 nt, synthetic construct
  misc_feature 1..20: note = C9Orf72 CTCN PAM targeting sequence
  source 1..20: mol_type = other RNA
cattccaacggtcagcaagt

SEQ ID NO: 16970 - RNA, 20 nt, synthetic construct
  misc_feature 1..20: note = C9Orf72 CTCN PAM targeting sequence
  source 1..20: mol_type = other RNA
gctctcattccaacggtcag

SEQ ID NO: 16971 - RNA, 20 nt, synthetic construct
  misc_feature 1..20: note = C9Orf72 CTCN PAM targeting sequence
  source 1..20: mol_type = other RNA
tgtgccgcctgcataccctg

SEQ ID NO: 16972 - RNA, 20 nt, synthetic construct
  misc_feature 1..20: note = C9Orf72 CTCN PAM targeting sequence
  source 1..20: mol_type = other RNA
aagaggtgaagggacagact

SEQ ID NO: 16973 - RNA, 20 nt, synthetic construct
  misc_feature 1..20: note = C9Orf72 CTCN PAM targeting sequence
  source 1..20: mol_type = other RNA
ttgagctttgatttcagggt

SEQ ID NO: 16974 - RNA, 20 nt, synthetic construct
  misc_feature 1..20: note = C9Orf72 CTCN PAM targeting sequence
  source 1..20: mol_type = other RNA
ataaagcccaagtctgtccc

SEQ ID NO: 16975 - RNA, 20 nt, synthetic construct
  misc_feature 1..20: note = C9Orf72 CTCN PAM targeting sequence
  source 1..20: mol_type = other RNA
tcatcacaaactagctctat

SEQ ID NO: 16976 - RNA, 20 nt, synthetic construct
  misc_feature 1..20: note = C9Orf72 CTCN PAM targeting sequence
  source 1..20: mol_type = other RNA
gagcctatgctccttctatt

SEQ ID NO: 16977 - RNA, 20 nt, synthetic construct
  misc_feature 1..20: note = C9Orf72 CTCN PAM targeting sequence
  source 1..20: mol_type = other RNA
gagacagacttgaattcaga

SEQ ID NO: 16978 - RNA, 20 nt, synthetic construct
  misc_feature 1..20: note = C9Orf72 CTCN PAM targeting sequence
  source 1..20: mol_type = other RNA
ttctattctgccaggaagct

SEQ ID NO: 16979 - RNA, 20 nt, synthetic construct
  misc_feature 1..20: note = C9Orf72 CTCN PAM targeting sequence
  source 1..20: mol_type = other RNA
tttcatctcatgcaaatacg

SEQ ID NO: 16980 - RNA, 20 nt, synthetic construct
  misc_feature 1..20: note = C9Orf72 CTCN PAM targeting sequence
  source 1..20: mol_type = other RNA
tgcaaatacgattgacacag

SEQ ID NO: 16981 - RNA, 20 nt, synthetic construct
  misc_feature 1..20: note = C9Orf72 CTCN PAM targeting sequence
  source 1..20: mol_type = other RNA
ggcctcaatcccatttatga

SEQ ID NO: 16982 - RNA, 20 nt, synthetic construct
  misc_feature 1..20: note = C9Orf72 CTCN PAM targeting sequence
  source 1..20: mol_type = other RNA
atcccatttatgattccagc

SEQ ID NO: 16983 - RNA, 20 nt, synthetic construct
  misc_feature 1..20: note = C9Orf72 CTCN PAM targeting sequence
  source 1..20: mol_type = other RNA
gttttcttgtctgaggaatg

SEQ ID NO: 16984 - RNA, 20 nt, synthetic construct
  misc_feature 1..20: note = C9Orf72 CTCN PAM targeting sequence
  source 1..20: mol_type = other RNA
gacaagaaaacagaggcttt

SEQ ID NO: 16985 - RNA, 20 nt, synthetic construct
  misc_feature 1..20: note = C9Orf72 CTCN PAM targeting sequence
  source 1..20: mol_type = other RNA
tcatgagaccacaaggacta

SEQ ID NO: 16986 - RNA, 20 nt, synthetic construct
  misc_feature 1..20: note = C9Orf72 CTCN PAM targeting sequence
  source 1..20: mol_type = other RNA
tgaagagctaggtattatta

SEQ ID NO: 16987 - RNA, 20 nt, synthetic construct
  misc_feature 1..20: note = C9Orf72 CTCN PAM targeting sequence
  source 1..20: mol_type = other RNA
tttagtccttgtggtctcat

SEQ ID NO: 16988 - RNA, 20 nt, synthetic construct
  misc_feature 1..20: note = C9Orf72 CTCN PAM targeting sequence
  source 1..20: mol_type = other RNA
tctgaatcaatgccaagaca

SEQ ID NO: 16989 - RNA, 20 nt, synthetic construct
  misc_feature 1..20: note = C9Orf72 CTCN PAM targeting sequence
  source 1..20: mol_type = other RNA
tgccacccctgtcttggcat

SEQ ID NO: 16990 - RNA, 20 nt, synthetic construct
  misc_feature 1..20: note = C9Orf72 CTCN PAM targeting sequence
  source 1..20: mol_type = other RNA
tctccaaaggataaactctt

SEQ ID NO: 16991 - RNA, 20 nt, synthetic construct
  misc_feature 1..20: note = C9Orf72 CTCN PAM targeting sequence
  source 1..20: mol_type = other RNA
aaaggataaactcttcttgg

SEQ ID NO: 16992 - RNA, 20 nt, synthetic construct
  misc_feature 1..20: note = C9Orf72 CTCN PAM targeting sequence
  source 1..20: mol_type = other RNA
tcttggaaagtatacttgga

SEQ ID NO: 16993 - RNA, 20 nt, synthetic construct
  misc_feature 1..20: note = C9Orf72 CTCN PAM targeting sequence
  source 1..20: mol_type = other RNA
tccaatatatgacatgtctt

SEQ ID NO: 16994 - RNA, 20 nt, synthetic construct
  misc_feature 1..20: note = C9Orf72 CTCN PAM targeting sequence
  source 1..20: mol_type = other RNA
ttggacagttcacatgctct

SEQ ID NO: 16995 - RNA, 20 nt, synthetic construct
  misc_feature 1..20: note = C9Orf72 CTCN PAM targeting sequence
  source 1..20: mol_type = other RNA
ttgaaactgttattcatgtc

SEQ ID NO: 16996 - RNA, 20 nt, synthetic construct
  misc_feature 1..20: note = C9Orf72 CTCN PAM targeting sequence
  source 1..20: mol_type = other RNA
gacatgaataacagtttcaa

SEQ ID NO: 16997 - RNA, 20 nt, synthetic construct
  misc_feature 1..20: note = C9Orf72 CTCN PAM targeting sequence
  source 1..20: mol_type = other RNA
gaagacagaagggacagcac

SEQ ID NO: 16998 - RNA, 20 nt, synthetic construct
  misc_feature 1..20: note = C9Orf72 CTCN PAM targeting sequence
  source 1..20: mol_type = other RNA
tattactggactctgaagac

SEQ ID NO: 16999 - RNA, 20 nt, synthetic construct
  misc_feature 1..20: note = C9Orf72 CTCN PAM targeting sequence
  source 1..20: mol_type = other RNA
acaagtcataaaaaccactc

SEQ ID NO: 17000 - RNA, 20 nt, synthetic construct
  misc_feature 1..20: note = C9Orf72 CTCN PAM targeting sequence
  source 1..20: mol_type = other RNA
ttctcaatagttcatgaata

SEQ ID NO: 17001 - RNA, 20 nt, synthetic construct
  misc_feature 1..20: note = C9Orf72 CTCN PAM targeting sequence
  source 1..20: mol_type = other RNA
atagttcatgaataaaaaca

SEQ ID NO: 17002 - RNA, 20 nt, synthetic construct
  misc_feature 1..20: note = C9Orf72 CTCN PAM targeting sequence
  source 1..20: mol_type = other RNA
tctggcagcgtggctgagaa

SEQ ID NO: 17003 - RNA, 20 nt, synthetic construct
  misc_feature 1..20: note = C9Orf72 CTCN PAM targeting sequence
  source 1..20: mol_type = other RNA
ggcagcgtggctgagaacac

SEQ ID NO: 17004 - RNA, 20 nt, synthetic construct
  misc_feature 1..20: note = C9Orf72 CTCN PAM targeting sequence
  source 1..20: mol_type = other RNA
gccacgctgccagaggaggt

SEQ ID NO: 17005 - RNA, 20 nt, synthetic construct
  misc_feature 1..20: note = C9Orf72 CTCN PAM targeting sequence
  source 1..20: mol_type = other RNA
tcctcttagcttattctctt

SEQ ID NO: 17006 - RNA, 20 nt, synthetic construct
  misc_feature 1..20: note = C9Orf72 CTCN PAM targeting sequence
  source 1..20: mol_type = other RNA
tcttagcttattctcttgcc

SEQ ID NO: 17007 - RNA, 20 nt, synthetic construct
  misc_feature 1..20: note = C9Orf72 CTCN PAM targeting sequence
  source 1..20: mol_type = other RNA
tagcttattctcttgcccct

SEQ ID NO: 17008 - RNA, 20 nt, synthetic construct
  misc_feature 1..20: note = C9Orf72 CTCN PAM targeting sequence
  source 1..20: mol_type = other RNA
tgccccttcatccatccatt

SEQ ID NO: 17009 - RNA, 20 nt, synthetic construct
  misc_feature 1..20: note = C9Orf72 CTCN PAM targeting sequence
  source 1..20: mol_type = other RNA
tgcctcctgctctctgtcta

SEQ ID NO: 17010 - RNA, 20 nt, synthetic construct
  misc_feature 1..20: note = C9Orf72 CTCN PAM targeting sequence
  source 1..20: mol_type = other RNA
tgctctctgtctatatatat

SEQ ID NO: 17011 - RNA, 20 nt, synthetic construct
  misc_feature 1..20: note = C9Orf72 CTCN PAM targeting sequence
  source 1..20: mol_type = other RNA
ctgtctatatatatacatac

SEQ ID NO: 17012 - RNA, 20 nt, synthetic construct
  misc_feature 1..20: note = C9Orf72 CTCN PAM targeting sequence
  source 1..20: mol_type = other RNA
gtctatatatatacatacat

SEQ ID NO: 17013 - RNA, 20 nt, synthetic construct
  misc_feature 1..20: note = C9Orf72 CTCN PAM targeting sequence
  source 1..20: mol_type = other RNA
gtatgtgtgtgtgtgtgtgt

SEQ ID NO: 17014 - RNA, 20 nt, synthetic construct
  misc_feature 1..20: note = C9Orf72 CTCN PAM targeting sequence
  source 1..20: mol_type = other RNA
ctgtatgtgtgtgtgtgtgt

SEQ ID NO: 17015 - RNA, 20 nt, synthetic construct
  misc_feature 1..20: note = C9Orf72 CTCN PAM targeting sequence
  source 1..20: mol_type = other RNA
ctctctgtatgtgtgtgtgt

SEQ ID NO: 17016 - RNA, 20 nt, synthetic construct
  misc_feature 1..20: note = C9Orf72 CTCN PAM targeting sequence
  source 1..20: mol_type = other RNA
ccctctctgtatgtgtgtgt

SEQ ID NO: 17017 - RNA, 20 nt, synthetic construct
  misc_feature 1..20: note = C9Orf72 CTCN PAM targeting sequence
  source 1..20: mol_type = other RNA
ctccctctctgtatgtgtgt

SEQ ID NO: 17018 - RNA, 20 nt, synthetic construct
  misc_feature 1..20: note = C9Orf72 CTCN PAM targeting sequence
  source 1..20: mol_type = other RNA
ctctccctctctgtatgtgt

SEQ ID NO: 17019 - RNA, 20 nt, synthetic construct
  misc_feature 1..20: note = C9Orf72 CTCN PAM targeting sequence
  source 1..20: mol_type = other RNA
ctctctccctctctgtatgt

SEQ ID NO: 17020 - RNA, 20 nt, synthetic construct
  misc_feature 1..20: note = C9Orf72 CTCN PAM targeting sequence
  source 1..20: mol_type = other RNA
cagctgaattttcatcagca

SEQ ID NO: 17021 - RNA, 20 nt, synthetic construct
  misc_feature 1..20: note = C9Orf72 CTCN PAM targeting sequence
  source 1..20: mol_type = other RNA
tagcagatgttttgtgttat

SEQ ID NO: 17022 - RNA, 20 nt, synthetic construct
  misc_feature 1..20: note = C9Orf72 CTCN PAM targeting sequence
  source 1..20: mol_type = other RNA
gtacgttcctcaagaaagtg

SEQ ID NO: 17023 - RNA, 20 nt, synthetic construct
  misc_feature 1..20: note = C9Orf72 CTCN PAM targeting sequence
  source 1..20: mol_type = other RNA
agaaagtgtctgttcgtcat

SEQ ID NO: 17024 - RNA, 20 nt, synthetic construct
  misc_feature 1..20: note = C9Orf72 CTCN PAM targeting sequence
  source 1..20: mol_type = other RNA
gcctaaaaaaagagaaaaca

SEQ ID NO: 17025 - RNA, 20 nt, synthetic construct
  misc_feature 1..20: note = C9Orf72 CTCN PAM targeting sequence
  source 1..20: mol_type = other RNA
ttttttaggcagaggaacaa

SEQ ID NO: 17026 - RNA, 20 nt, synthetic construct
  misc_feature 1..20: note = C9Orf72 CTCN PAM targeting sequence
  source 1..20: mol_type = other RNA
gttttccaactccctccctc

SEQ ID NO: 17027 - RNA, 20 nt, synthetic construct
  misc_feature 1..20: note = C9Orf72 CTCN PAM targeting sequence
  source 1..20: mol_type = other RNA
ctccctctgcccctccccag

SEQ ID NO: 17028 - RNA, 20 nt, synthetic construct
  misc_feature 1..20: note = C9Orf72 CTCN PAM targeting sequence
  source 1..20: mol_type = other RNA
ctctgcccctccccagcccc

SEQ ID NO: 17029 - RNA, 20 nt, synthetic construct
  misc_feature 1..20: note = C9Orf72 CTCN PAM targeting sequence
  source 1..20: mol_type = other RNA
gcccctccccagcccctttg

SEQ ID NO: 17030 - RNA, 20 nt, synthetic construct
  misc_feature 1..20: note = C9Orf72 CTCN PAM targeting sequence
  source 1..20: mol_type = other RNA
ccagcccctttgtgctgtcc

SEQ ID NO: 17031 - RNA, 20 nt, synthetic construct
  misc_feature 1..20: note = C9Orf72 CTCN PAM targeting sequence
  source 1..20: mol_type = other RNA
agtctgttatcatggtggtt

SEQ ID NO: 17032 - RNA, 20 nt, synthetic construct
  misc_feature 1..20: note = C9Orf72 CTCN PAM targeting sequence
  source 1..20: mol_type = other RNA
agagagtcttaattctttca

SEQ ID NO: 17033 - RNA, 20 nt, synthetic construct
  misc_feature 1..20: note = C9Orf72 CTCN PAM targeting sequence
  source 1..20: mol_type = other RNA
tgagaacatataatcacata

SEQ ID NO: 17034 - RNA, 20 nt, synthetic construct
  misc_feature 1..20: note = C9Orf72 CTCN PAM targeting sequence
  source 1..20: mol_type = other RNA
cttgagaacatataatcaca

SEQ ID NO: 17035 - RNA, 20 nt, synthetic construct
  misc_feature 1..20: note = C9Orf72 CTCN PAM targeting sequence
  source 1..20: mol_type = other RNA
ttggggtggctgaaacagca

SEQ ID NO: 17036 - RNA, 20 nt, synthetic construct
  misc_feature 1..20: note = C9Orf72 CTCN PAM targeting sequence
  source 1..20: mol_type = other RNA
tggttgctccttggggtggc

SEQ ID NO: 17037 - RNA, 20 nt, synthetic construct
  misc_feature 1..20: note = C9Orf72 CTCN PAM targeting sequence
  source 1..20: mol_type = other RNA
tcacacctcctcctacccct

SEQ ID NO: 17038 - RNA, 20 nt, synthetic construct
  misc_feature 1..20: note = C9Orf72 CTCN PAM targeting sequence
  source 1..20: mol_type = other RNA
tcctacccctgagcgccact

SEQ ID NO: 17039 - RNA, 20 nt, synthetic construct
  misc_feature 1..20: note = C9Orf72 CTCN PAM targeting sequence
  source 1..20: mol_type = other RNA
tacccctgagcgccacttct

SEQ ID NO: 17040 - RNA, 20 nt, synthetic construct
  misc_feature 1..20: note = C9Orf72 CTCN PAM targeting sequence
  source 1..20: mol_type = other RNA
ggggtaggaggaggtgtgac

SEQ ID NO: 17041 - RNA, 20 nt, synthetic construct
  misc_feature 1..20: note = C9Orf72 CTCN PAM targeting sequence
  source 1..20: mol_type = other RNA
gaagtggcgctcaggggtag

SEQ ID NO: 17042 - RNA, 20 nt, synthetic construct
  misc_feature 1..20: note = C9Orf72 CTCN PAM targeting sequence
  source 1..20: mol_type = other RNA
tcagcatccccagctcccag

SEQ ID NO: 17043 - RNA, 20 nt, synthetic construct
  misc_feature 1..20: note = C9Orf72 CTCN PAM targeting sequence
  source 1..20: mol_type = other RNA
cagatggctgcctttgtccc

SEQ ID NO: 17044 - RNA, 20 nt, synthetic construct
  misc_feature 1..20: note = C9Orf72 CTCN PAM targeting sequence
  source 1..20: mol_type = other RNA
tttcacatccatgctgtgaa

SEQ ID NO: 17045 - RNA, 20 nt, synthetic construct
  misc_feature 1..20: note = C9Orf72 CTCN PAM targeting sequence
  source 1..20: mol_type = other RNA
tttgtcccatttgattttca

SEQ ID NO: 17046 - RNA, 20 nt, synthetic construct
  misc_feature 1..20: note = C9Orf72 CTCN PAM targeting sequence
  source 1..20: mol_type = other RNA
ggctcatttgtcccatttga

SEQ ID NO: 17047 - RNA, 20 nt, synthetic construct
  misc_feature 1..20: note = C9Orf72 CTCN PAM targeting sequence
  source 1..20: mol_type = other RNA
gctctggctcatttgtccca

SEQ ID NO: 17048 - RNA, 20 nt, synthetic construct
  misc_feature 1..20: note = C9Orf72 CTCN PAM targeting sequence
  source 1..20: mol_type = other RNA
gcctgactttccagaaccaa

SEQ ID NO: 17049 - RNA, 20 nt, synthetic construct
  misc_feature 1..20: note = C9Orf72 CTCN PAM targeting sequence
  source 1..20: mol_type = other RNA
tggtacctcagcctgacttt

SEQ ID NO: 17050 - RNA, 20 nt, synthetic construct
  misc_feature 1..20: note = C9Orf72 CTCN PAM targeting sequence
  source 1..20: mol_type = other RNA
tgaaaaaaaccagaaggtgt

SEQ ID NO: 17051 - RNA, 20 nt, synthetic construct
  misc_feature 1..20: note = C9Orf72 CTCN PAM targeting sequence
  source 1..20: mol_type = other RNA
caatattacatccatgacaa

SEQ ID NO: 17052 - RNA, 20 nt, synthetic construct
  misc_feature 1..20: note = C9Orf72 CTCN PAM targeting sequence
  source 1..20: mol_type = other RNA
caaataaaactattctttat

SEQ ID NO: 17053 - RNA, 20 nt, synthetic construct
  misc_feature 1..20: note = C9Orf72 CTCN PAM targeting sequence
  source 1..20: mol_type = other RNA
aaatttctcttcagccccac

SEQ ID NO: 17054 - RNA, 20 nt, synthetic construct
  misc_feature 1..20: note = C9Orf72 CTCN PAM targeting sequence
  source 1..20: mol_type = other RNA
tcagccccactgcctccttc

SEQ ID NO: 17055 - RNA, 20 nt, synthetic construct
  misc_feature 1..20: note = C9Orf72 CTCN PAM targeting sequence
  source 1..20: mol_type = other RNA
ttcctagctcacctcctgcc

SEQ ID NO: 17056 - RNA, 20 nt, synthetic construct
  misc_feature 1..20: note = C9Orf72 CTCN PAM targeting sequence
  source 1..20: mol_type = other RNA
cctcctgcctagtttatgca

SEQ ID NO: 17057 - RNA, 20 nt, synthetic construct
  misc_feature 1..20: note = C9Orf72 CTCN PAM targeting sequence
  source 1..20: mol_type = other RNA
tgcctagtttatgcaggtcc

SEQ ID NO: 17058 - RNA, 20 nt, synthetic construct
  misc_feature 1..20: note = C9Orf72 CTCN PAM targeting sequence
  source 1..20: mol_type = other RNA
tgcatttcttcaatctccac

SEQ ID NO: 17059 - RNA, 20 nt, synthetic construct
  misc_feature 1..20: note = C9Orf72 CTCN PAM targeting sequence
  source 1..20: mol_type = other RNA
acttggcaggtgaaggacct

SEQ ID NO: 17060 - RNA, 20 nt, synthetic construct
  misc_feature 1..20: note = C9Orf72 CTCN PAM targeting sequence
  source 1..20: mol_type = other RNA
aaagcagcctcctactgctt

SEQ ID NO: 17061 - RNA, 20 nt, synthetic construct
  misc_feature 1..20: note = C9Orf72 CTCN PAM targeting sequence
  source 1..20: mol_type = other RNA
tactgcttccaaggtgaaat

SEQ ID NO: 17062 - RNA, 20 nt, synthetic construct
  misc_feature 1..20: note = C9Orf72 CTCN PAM targeting sequence
  source 1..20: mol_type = other RNA
caacttgcatgtaatactcc

SEQ ID NO: 17063 - RNA, 20 nt, synthetic construct
  misc_feature 1..20: note = C9Orf72 CTCN PAM targeting sequence
  source 1..20: mol_type = other RNA
agccatctgaagctacgatc

SEQ ID NO: 17064 - RNA, 20 nt, synthetic construct
  misc_feature 1..20: note = C9Orf72 CTCN PAM targeting sequence
  source 1..20: mol_type = other RNA
ttctcacttgcttctgggcg

SEQ ID NO: 17065 - RNA, 20 nt, synthetic construct
  misc_feature 1..20: note = C9Orf72 CTCN PAM targeting sequence
  source 1..20: mol_type = other RNA
cttgcttctgggcgttgcta

SEQ ID NO: 17066 - RNA, 20 nt, synthetic construct
  misc_feature 1..20: note = C9Orf72 CTCN PAM targeting sequence
  source 1..20: mol_type = other RNA
agtatgtagcaacgcccaga

SEQ ID NO: 17067 - RNA, 20 nt, synthetic construct
  misc_feature 1..20: note = C9Orf72 CTCN PAM targeting sequence
  source 1..20: mol_type = other RNA
tcctcagcttctccatttcg

SEQ ID NO: 17068 - RNA, 20 nt, synthetic construct
  misc_feature 1..20: note = C9Orf72 CTCN PAM targeting sequence
  source 1..20: mol_type = other RNA
gcttctccatttcgcctgac

SEQ ID NO: 17069 - RNA, 20 nt, synthetic construct
  misc_feature 1..20: note = C9Orf72 CTCN PAM targeting sequence
  source 1..20: mol_type = other RNA
atttcgcctgactaactccc

SEQ ID NO: 17070 - RNA, 20 nt, synthetic construct
  misc_feature 1..20: note = C9Orf72 CTCN PAM targeting sequence
  source 1..20: mol_type = other RNA
catttgttattcaaacctta

SEQ ID NO: 17071 - RNA, 20 nt, synthetic construct
  misc_feature 1..20: note = C9Orf72 CTCN PAM targeting sequence
  source 1..20: mol_type = other RNA
agaacgtcctccctggccac

SEQ ID NO: 17072 - RNA, 20 nt, synthetic construct
  misc_feature 1..20: note = C9Orf72 CTCN PAM targeting sequence
  source 1..20: mol_type = other RNA
ctggccacctcaccctcagt

SEQ ID NO: 17073 - RNA, 20 nt, synthetic construct
  misc_feature 1..20: note = C9Orf72 CTCN PAM targeting sequence
  source 1..20: mol_type = other RNA
ccctcagtctaggtaggcat

SEQ ID NO: 17074 - RNA, 20 nt, synthetic construct
  misc_feature 1..20: note = C9Orf72 CTCN PAM targeting sequence
  source 1..20: mol_type = other RNA
gtctaggtaggcatatcata

SEQ ID NO: 17075 - RNA, 20 nt, synthetic construct
  misc_feature 1..20: note = C9Orf72 CTCN PAM targeting sequence
  source 1..20: mol_type = other RNA
caggagactgaaaattgtgt

SEQ ID NO: 17076 - RNA, 20 nt, synthetic construct
  misc_feature 1..20: note = C9Orf72 CTCN PAM targeting sequence
  source 1..20: mol_type = other RNA
tgggagacaaaaaaaaaaaa

SEQ ID NO: 17077 - RNA, 20 nt, synthetic construct
  misc_feature 1..20: note = C9Orf72 CTCN PAM targeting sequence
  source 1..20: mol_type = other RNA
atatgtaattattgaatgca

SEQ ID NO: 17078 - RNA, 20 nt, synthetic construct
  misc_feature 1..20: note = C9Orf72 CTCN PAM targeting sequence
  source 1..20: mol_type = other RNA
aatgcacgtgttgaaatcct

SEQ ID NO: 17079 - RNA, 20 nt, synthetic construct
  misc_feature 1..20: note = C9Orf72 CTCN PAM targeting sequence
  source 1..20: mol_type = other RNA
tagtaccatcagcctgggaa

SEQ ID NO: 17080 - RNA, 20 nt, synthetic construct
  misc_feature 1..20: note = C9Orf72 CTCN PAM targeting sequence
  source 1..20: mol_type = other RNA
caaaggccccacctcctagt

SEQ ID NO: 17081 - RNA, 20 nt, synthetic construct
  misc_feature 1..20: note = C9Orf72 CTCN PAM targeting sequence
  source 1..20: mol_type = other RNA
tttttaaaggcactaatccc

SEQ ID NO: 17082 - RNA, 20 nt, synthetic construct
  misc_feature 1..20: note = C9Orf72 CTCN PAM targeting sequence
  source 1..20: mol_type = other RNA
ggcctgtaatcccagcactt

SEQ ID NO: 17083 - RNA, 20 nt, synthetic construct
  misc_feature 1..20: note = C9Orf72 CTCN PAM targeting sequence
  source 1..20: mol_type = other RNA
caaagtgctgggattacagg

SEQ ID NO: 17084 - RNA, 20 nt, synthetic construct
  misc_feature 1..20: note = C9Orf72 CTCN PAM targeting sequence
  source 1..20: mol_type = other RNA
ggtgatctgcccaccttagc

SEQ ID NO: 17085 - RNA, 20 nt, synthetic construct
  misc_feature 1..20: note = C9Orf72 CTCN PAM targeting sequence
  source 1..20: mol_type = other RNA
atgttggtcaggccggtctt

SEQ ID NO: 17086 - RNA, 20 nt, synthetic construct
  misc_feature 1..20: note = C9Orf72 CTCN PAM targeting sequence
  source 1..20: mol_type = other RNA
ctagtagctgggattacaag

SEQ ID NO: 17087 - RNA, 20 nt, synthetic construct
  misc_feature 1..20: note = C9Orf72 CTCN PAM targeting sequence
  source 1..20: mol_type = other RNA
gcctccctagtagctgggat

SEQ ID NO: 17088 - RNA, 20 nt, synthetic construct
  misc_feature 1..20: note = C9Orf72 CTCN PAM targeting sequence
  source 1..20: mol_type = other RNA
tgcctcagcctccctagtag

SEQ ID NO: 17089 - RNA, 20 nt, synthetic construct
  misc_feature 1..20: note = C9Orf72 CTCN PAM targeting sequence
  source 1..20: mol_type = other RNA
gccttccaagttcaagtgat

SEQ ID NO: 17090 - RNA, 20 nt, synthetic construct
  misc_feature 1..20: note = C9Orf72 CTCN PAM targeting sequence
  source 1..20: mol_type = other RNA
ccgcaacctctgccttccaa

SEQ ID NO: 17091 - RNA, 20 nt, synthetic construct
  misc_feature 1..20: note = C9Orf72 CTCN PAM targeting sequence
  source 1..20: mol_type = other RNA
agactgggcaacaagagtga

SEQ ID NO: 17092 - RNA, 20 nt, synthetic construct
  misc_feature 1..20: note = C9Orf72 CTCN PAM targeting sequence
  source 1..20: mol_type = other RNA
tgttgcccagtctggagtgc

SEQ ID NO: 17093 - RNA, 20 nt, synthetic construct
  misc_feature 1..20: note = C9Orf72 CTCN PAM targeting sequence
  source 1..20: mol_type = other RNA
atctcagaaaaaaaaaaaag

SEQ ID NO: 17094 - RNA, 20 nt, synthetic construct
  misc_feature 1..20: note = C9Orf72 CTCN PAM targeting sequence
  source 1..20: mol_type = other RNA
gaaaaaaaaaaaagaaaaaa

SEQ ID NO: 17095 - RNA, 20 nt, synthetic construct
  misc_feature 1..20: note = C9Orf72 CTCN PAM targeting sequence
  source 1..20: mol_type = other RNA
ttttttcttttttttttttc

SEQ ID NO: 17096 - RNA, 20 nt, synthetic construct
  misc_feature 1..20: note = C9Orf72 CTCN PAM targeting sequence
  source 1..20: mol_type = other RNA
atgtgaagttatagcaaaaa

SEQ ID NO: 17097 - RNA, 20 nt, synthetic construct
  misc_feature 1..20: note = C9Orf72 CTCN PAM targeting sequence
  source 1..20: mol_type = other RNA
ccagacactgaacccaccag

SEQ ID NO: 17098 - RNA, 20 nt, synthetic construct
  misc_feature 1..20: note = C9Orf72 CTCN PAM targeting sequence
  source 1..20: mol_type = other RNA
tgaactgtgagaaataaaca

SEQ ID NO: 17099 - RNA, 20 nt, synthetic construct
  misc_feature 1..20: note = C9Orf72 CTCN PAM targeting sequence
  source 1..20: mol_type = other RNA
cagttcaggaggctgggaag

SEQ ID NO: 17100 - RNA, 20 nt, synthetic construct
  misc_feature 1..20: note = C9Orf72 CTCN PAM targeting sequence
  source 1..20: mol_type = other RNA
gtttgtggtatttttgttgt

SEQ ID NO: 17101 - RNA, 20 nt, synthetic construct
  misc_feature 1..20: note = C9Orf72 CTCN PAM targeting sequence
  source 1..20: mol_type = other RNA
ggtttctatggttatttgtt

SEQ ID NO: 17102 - RNA, 20 nt, synthetic construct
  misc_feature 1..20: note = C9Orf72 CTCN PAM targeting sequence
  source 1..20: mol_type = other RNA
cgcacaactcaggtttctat

SEQ ID NO: 17103 - RNA, 20 nt, synthetic construct
  misc_feature 1..20: note = C9Orf72 CTCN PAM targeting sequence
  source 1..20: mol_type = other RNA
tcaccactcccgcacaactc

SEQ ID NO: 17104 - RNA, 20 nt, synthetic construct
  misc_feature 1..20: note = C9Orf72 CTCN PAM targeting sequence
  source 1..20: mol_type = other RNA
aagcactggcccttgagtca

SEQ ID NO: 17105 - RNA, 20 nt, synthetic construct
  misc_feature 1..20: note = C9Orf72 CTCN PAM targeting sequence
  source 1..20: mol_type = other RNA
agggccagtgcttggagttg

SEQ ID NO: 17106 - RNA, 20 nt, synthetic construct
  misc_feature 1..20: note = C9Orf72 CTCN PAM targeting sequence
  source 1..20: mol_type = other RNA
atggaattgctataggccca

SEQ ID NO: 17107 - RNA, 20 nt, synthetic construct
  misc_feature 1..20: note = C9Orf72 CTCN PAM targeting sequence
  source 1..20: mol_type = other RNA
ttagacgtgacttggttaaa

SEQ ID NO: 17108 - RNA, 20 nt, synthetic construct
  misc_feature 1..20: note = C9Orf72 CTCN PAM targeting sequence
  source 1..20: mol_type = other RNA
tcacaccttgcagatctcgg

SEQ ID NO: 17109 - RNA, 20 nt, synthetic construct
  misc_feature 1..20: note = C9Orf72 CTCN PAM targeting sequence
  source 1..20: mol_type = other RNA
gagagaaacgcatctatcag

SEQ ID NO: 17110 - RNA, 20 nt, synthetic construct
  misc_feature 1..20: note = C9Orf72 CTCN PAM targeting sequence
  source 1..20: mol_type = other RNA
gagatctgcaaggtgtgaag

SEQ ID NO: 17111 - RNA, 20 nt, synthetic construct
  misc_feature 1..20: note = C9Orf72 CTCN PAM targeting sequence
  source 1..20: mol_type = other RNA
ccgagatctgcaaggtgtga

SEQ ID NO: 17112 - RNA, 20 nt, synthetic construct
  misc_feature 1..20: note = C9Orf72 CTCN PAM targeting sequence
  source 1..20: mol_type = other RNA
gtatcagtaaaaatctgata

SEQ ID NO: 17113 - RNA, 20 nt, synthetic construct
  misc_feature 1..20: note = C9Orf72 CTCN PAM targeting sequence
  source 1..20: mol_type = other RNA
ctcttcgaattgtattgtac

SEQ ID NO: 17114 - RNA, 20 nt, synthetic construct
  misc_feature 1..20: note = C9Orf72 CTCN PAM targeting sequence
  source 1..20: mol_type = other RNA
tcgaattgtattgtacattt

SEQ ID NO: 17115 - RNA, 20 nt, synthetic construct
  misc_feature 1..20: note = C9Orf72 CTCN PAM targeting sequence
  source 1..20: mol_type = other RNA
ggaaaactacctgtttgact

SEQ ID NO: 17116 - RNA, 20 nt, synthetic construct
  misc_feature 1..20: note = C9Orf72 CTCN PAM targeting sequence
  source 1..20: mol_type = other RNA
gcatgatttgccaaccaaat

SEQ ID NO: 17117 - RNA, 20 nt, synthetic construct
  misc_feature 1..20: note = C9Orf72 CTCN PAM targeting sequence
  source 1..20: mol_type = other RNA
cattatgtgtctcagcatga

SEQ ID NO: 17118 - RNA, 20 nt, synthetic construct
  misc_feature 1..20: note = C9Orf72 CTCN PAM targeting sequence
  source 1..20: mol_type = other RNA
tcccattatgtgtctcagca

SEQ ID NO: 17119 - RNA, 20 nt, synthetic construct
  misc_feature 1..20: note = C9Orf72 CTCN PAM targeting sequence
  source 1..20: mol_type = other RNA
cttgcccccacctcctccca

SEQ ID NO: 17120 - RNA, 20 nt, synthetic construct
  misc_feature 1..20: note = C9Orf72 CTCN PAM targeting sequence
  source 1..20: mol_type = other RNA
ttgtacagttgggggaaccc

SEQ ID NO: 17121 - RNA, 20 nt, synthetic construct
  misc_feature 1..20: note = C9Orf72 CTCN PAM targeting sequence
  source 1..20: mol_type = other RNA
agttgggttccaattgttct

SEQ ID NO: 17122 - RNA, 20 nt, synthetic construct
  misc_feature 1..20: note = C9Orf72 CTCN PAM targeting sequence
  source 1..20: mol_type = other RNA
gcaaagccccgctcaagttg

SEQ ID NO: 17123 - RNA, 20 nt, synthetic construct
  misc_feature 1..20: note = C9Orf72 CTCN PAM targeting sequence
  source 1..20: mol_type = other RNA
ggttcatttcagaagggtca

SEQ ID NO: 17124 - RNA, 20 nt, synthetic construct
  misc_feature 1..20: note = C9Orf72 CTCN PAM targeting sequence
  source 1..20: mol_type = other RNA
agacaaacagaatctgaggg

SEQ ID NO: 17125 - RNA, 20 nt, synthetic construct
  misc_feature 1..20: note = C9Orf72 CTCN PAM targeting sequence
  source 1..20: mol_type = other RNA
gattctgtttgtctggagaa

SEQ ID NO: 17126 - RNA, 20 nt, synthetic construct
  misc_feature 1..20: note = C9Orf72 CTCN PAM targeting sequence
  source 1..20: mol_type = other RNA
ccgtctttccctcagattct

SEQ ID NO: 17127 - RNA, 20 nt, synthetic construct
  misc_feature 1..20: note = C9Orf72 CTCN PAM targeting sequence
  source 1..20: mol_type = other RNA
gcatccactcaccgtctttc

SEQ ID NO: 17128 - RNA, 20 nt, synthetic construct
  misc_feature 1..20: note = C9Orf72 CTCN PAM targeting sequence
  source 1..20: mol_type = other RNA
atgtcaggtggaaaaagtcc

SEQ ID NO: 17129 - RNA, 20 nt, synthetic construct
  misc_feature 1..20: note = C9Orf72 CTCN PAM targeting sequence
  source 1..20: mol_type = other RNA
gtgctgccttaacccctcta

SEQ ID NO: 17130 - RNA, 20 nt, synthetic construct
  misc_feature 1..20: note = C9Orf72 CTCN PAM targeting sequence
  source 1..20: mol_type = other RNA
ccatttcttgctcagtgctg

SEQ ID NO: 17131 - RNA, 20 nt, synthetic construct
  misc_feature 1..20: note = C9Orf72 CTCN PAM targeting sequence
  source 1..20: mol_type = other RNA
aaaatcttatctctgggtca

SEQ ID NO: 17132 - RNA, 20 nt, synthetic construct
  misc_feature 1..20: note = C9Orf72 CTCN PAM targeting sequence
  source 1..20: mol_type = other RNA
gggtcaaagtcaagctaaat

SEQ ID NO: 17133 - RNA, 20 nt, synthetic construct
  misc_feature 1..20: note = C9Orf72 CTCN PAM targeting sequence
  source 1..20: mol_type = other RNA
ttcatgttcctttgtaatcc

SEQ ID NO: 17134 - RNA, 20 nt, synthetic construct
  misc_feature 1..20: note = C9Orf72 CTCN PAM targeting sequence
  source 1..20: mol_type = other RNA
cgatcatattacacccagcc

SEQ ID NO: 17135 - RNA, 20 nt, synthetic construct
  misc_feature 1..20: note = C9Orf72 CTCN PAM targeting sequence
  source 1..20: mol_type = other RNA
aggctggcacagtccacgcc

SEQ ID NO: 17136 - RNA, 20 nt, synthetic construct
  misc_feature 1..20: note = C9Orf72 CTCN PAM targeting sequence
  source 1..20: mol_type = other RNA
ccaggctggcacagtccacg

SEQ ID NO: 17137 - RNA, 20 nt, synthetic construct
  misc_feature 1..20: note = C9Orf72 CTCN PAM targeting sequence
  source 1..20: mol_type = other RNA
cagccttagctgattgttgg

SEQ ID NO: 17138 - RNA, 20 nt, synthetic construct
  misc_feature 1..20: note = C9Orf72 CTCN PAM targeting sequence
  source 1..20: mol_type = other RNA
gccttagctgattgttggcc

SEQ ID NO: 17139 - RNA, 20 nt, synthetic construct
  misc_feature 1..20: note = C9Orf72 CTCN PAM targeting sequence
  source 1..20: mol_type = other RNA
ccgtggttaaattttagtta

SEQ ID NO: 17140 - RNA, 20 nt, synthetic construct
  misc_feature 1..20: note = C9Orf72 CTCN PAM targeting sequence
  source 1..20: mol_type = other RNA
ctcagcctggaagttgactc

SEQ ID NO: 17141 - RNA, 20 nt, synthetic construct
  misc_feature 1..20: note = C9Orf72 CTCN PAM targeting sequence
  source 1..20: mol_type = other RNA
gcctggaagttgactctata

SEQ ID NO: 17142 - RNA, 20 nt, synthetic construct
  misc_feature 1..20: note = C9Orf72 CTCN PAM targeting sequence
  source 1..20: mol_type = other RNA
ataagctgacagcttaattt

SEQ ID NO: 17143 - RNA, 20 nt, synthetic construct
  misc_feature 1..20: note = C9Orf72 CTCN PAM targeting sequence
  source 1..20: mol_type = other RNA
cgtagcactgagcacatgaa

SEQ ID NO: 17144 - RNA, 20 nt, synthetic construct
  misc_feature 1..20: note = C9Orf72 CTCN PAM targeting sequence
  source 1..20: mol_type = other RNA
tagcactgagcacatgaaac

SEQ ID NO: 17145 - RNA, 20 nt, synthetic construct
  misc_feature 1..20: note = C9Orf72 CTCN PAM targeting sequence
  source 1..20: mol_type = other RNA
gtgctacgagagtgtttttc

SEQ ID NO: 17146 - RNA, 20 nt, synthetic construct
  misc_feature 1..20: note = C9Orf72 CTCN PAM targeting sequence
  source 1..20: mol_type = other RNA
aaggggccctgattccttta

SEQ ID NO: 17147 - RNA, 20 nt, synthetic construct
  misc_feature 1..20: note = C9Orf72 CTCN PAM targeting sequence
  source 1..20: mol_type = other RNA
gtcctagaatcagccatttt

SEQ ID NO: 17148 - RNA, 20 nt, synthetic construct
  misc_feature 1..20: note = C9Orf72 CTCN PAM targeting sequence
  source 1..20: mol_type = other RNA
tacgcccctgtcattgtgtt

SEQ ID NO: 17149 - RNA, 20 nt, synthetic construct
  misc_feature 1..20: note = C9Orf72 CTCN PAM targeting sequence
  source 1..20: mol_type = other RNA
ttcaggttggctcctacgcc

SEQ ID NO: 17150 - RNA, 20 nt, synthetic construct
  misc_feature 1..20: note = C9Orf72 CTCN PAM targeting sequence
  source 1..20: mol_type = other RNA
ggaatggcccaaactggaac

SEQ ID NO: 17151 - RNA, 20 nt, synthetic construct
  misc_feature 1..20: note = C9Orf72 CTCN PAM targeting sequence
  source 1..20: mol_type = other RNA
gattgttccagtttgggcca

SEQ ID NO: 17152 - RNA, 20 nt, synthetic construct
  misc_feature 1..20: note = C9Orf72 CTCN PAM targeting sequence
  source 1..20: mol_type = other RNA
atctatttttttgctcagat

SEQ ID NO: 17153 - RNA, 20 nt, synthetic construct
  misc_feature 1..20: note = C9Orf72 CTCN PAM targeting sequence
  source 1..20: mol_type = other RNA
cagatatttattttctactt

SEQ ID NO: 17154 - RNA, 20 nt, synthetic construct
  misc_feature 1..20: note = C9Orf72 CTCN PAM targeting sequence
  source 1..20: mol_type = other RNA
tgtgtagtgagattccaaat

SEQ ID NO: 17155 - RNA, 20 nt, synthetic construct
  misc_feature 1..20: note = C9Orf72 CTCN PAM targeting sequence
  source 1..20: mol_type = other RNA
ctacacaggagatttttctt

SEQ ID NO: 17156 - RNA, 20 nt, synthetic construct
  misc_feature 1..20: note = C9Orf72 CTCN PAM targeting sequence
  source 1..20: mol_type = other RNA
ctgttcaaggagatgaatga

SEQ ID NO: 17157 - RNA, 20 nt, synthetic construct
  misc_feature 1..20: note = C9Orf72 CTCN PAM targeting sequence
  source 1..20: mol_type = other RNA
ttgaacagggagtatttaca

SEQ ID NO: 17158 - RNA, 20 nt, synthetic construct
  misc_feature 1..20: note = C9Orf72 CTCN PAM targeting sequence
  source 1..20: mol_type = other RNA
tgagcgtgggctatgcttgg

SEQ ID NO: 17159 - RNA, 20 nt, synthetic construct
  misc_feature 1..20: note = C9Orf72 CTCN PAM targeting sequence
  source 1..20: mol_type = other RNA
agagcttcattcatctcctt

SEQ ID NO: 17160 - RNA, 20 nt, synthetic construct
  misc_feature 1..20: note = C9Orf72 CTCN PAM targeting sequence
  source 1..20: mol_type = other RNA
ccaagcatagcccacgctca

SEQ ID NO: 17161 - RNA, 20 nt, synthetic construct
  misc_feature 1..20: note = C9Orf72 CTCN PAM targeting sequence
  source 1..20: mol_type = other RNA
ttggaagcaactcaccaagc

SEQ ID NO: 17162 - RNA, 20 nt, synthetic construct
  misc_feature 1..20: note = C9Orf72 CTCN PAM targeting sequence
  source 1..20: mol_type = other RNA
ctccccataacccataagcc

SEQ ID NO: 17163 - RNA, 20 nt, synthetic construct
  misc_feature 1..20: note = C9Orf72 CTCN PAM targeting sequence
  source 1..20: mol_type = other RNA
ccataacccataagccctat

SEQ ID NO: 17164 - RNA, 20 nt, synthetic construct
  misc_feature 1..20: note = C9Orf72 CTCN PAM targeting sequence
  source 1..20: mol_type = other RNA
aaactgtcaagttcatcaaa

SEQ ID NO: 17165 - RNA, 20 nt, synthetic construct
  misc_feature 1..20: note = C9Orf72 CTCN PAM targeting sequence
  source 1..20: mol_type = other RNA
tcagactttccttgttttga

SEQ ID NO: 17166 - RNA, 20 nt, synthetic construct
  misc_feature 1..20: note = C9Orf72 CTCN PAM targeting sequence
  source 1..20: mol_type = other RNA
ttaggctcttcagactttcc

SEQ ID NO: 17167 - RNA, 20 nt, synthetic construct
  misc_feature 1..20: note = C9Orf72 CTCN PAM targeting sequence
  source 1..20: mol_type = other RNA
acacagtattcagtttttcc

SEQ ID NO: 17168 - RNA, 20 nt, synthetic construct
  misc_feature 1..20: note = C9Orf72 CTCN PAM targeting sequence
  source 1..20: mol_type = other RNA
gctgtgacaaatgttttgtg

SEQ ID NO: 17169 - RNA, 20 nt, synthetic construct
  misc_feature 1..20: note = C9Orf72 CTCN PAM targeting sequence
  source 1..20: mol_type = other RNA
caaaacatttgtcacagctg

SEQ ID NO: 17170 - RNA, 20 nt, synthetic construct
  misc_feature 1..20: note = C9Orf72 CTCN PAM targeting sequence
  source 1..20: mol_type = other RNA
cccagtttccagtatcgcta

SEQ ID NO: 17171 - RNA, 20 nt, synthetic construct
  misc_feature 1..20: note = C9Orf72 CTCN PAM targeting sequence
  source 1..20: mol_type = other RNA
gtactatctttacaactttt

SEQ ID NO: 17172 - RNA, 20 nt, synthetic construct
  misc_feature 1..20: note = C9Orf72 CTCN PAM targeting sequence
  source 1..20: mol_type = other RNA
taatataaacattttcttta

SEQ ID NO: 17173 - RNA, 20 nt, synthetic construct
  misc_feature 1..20: note = C9Orf72 CTCN PAM targeting sequence
  source 1..20: mol_type = other RNA
gtgggtcaaaaatatttgat

SEQ ID NO: 17174 - RNA, 20 nt, synthetic construct
  misc_feature 1..20: note = C9Orf72 CTCN PAM targeting sequence
  source 1..20: mol_type = other RNA
agaggccatgagtttgtacg

SEQ ID NO: 17175 - RNA, 20 nt, synthetic construct
  misc_feature 1..20: note = C9Orf72 CTCN PAM targeting sequence
  source 1..20: mol_type = other RNA
ggagccaatcaaatattttt

SEQ ID NO: 17176 - RNA, 20 nt, synthetic construct
  misc_feature 1..20: note = C9Orf72 CTCN PAM targeting sequence
  source 1..20: mol_type = other RNA
tggcctctggagccaatcaa

SEQ ID NO: 17177 - RNA, 20 nt, synthetic construct
  misc_feature 1..20: note = C9Orf72 CTCN PAM targeting sequence
  source 1..20: mol_type = other RNA
gatcaggactggctacataa

SEQ ID NO: 17178 - RNA, 20 nt, synthetic construct
  misc_feature 1..20: note = C9Orf72 CTCN PAM targeting sequence
  source 1..20: mol_type = other RNA
gcaaattatgtagccagtcc

SEQ ID NO: 17179 - RNA, 20 nt, synthetic construct
  misc_feature 1..20: note = C9Orf72 CTCN PAM targeting sequence
  source 1..20: mol_type = other RNA
gctgttgccatcttgaagtg

SEQ ID NO: 17180 - RNA, 20 nt, synthetic construct
  misc_feature 1..20: note = C9Orf72 CTCN PAM targeting sequence
  source 1..20: mol_type = other RNA
gaatggccccatgcttggtt

SEQ ID NO: 17181 - RNA, 20 nt, synthetic construct
  misc_feature 1..20: note = C9Orf72 CTCN PAM targeting sequence
  source 1..20: mol_type = other RNA
gacatgtgatatgatctgaa

SEQ ID NO: 17182 - RNA, 20 nt, synthetic construct
  misc_feature 1..20: note = C9Orf72 CTCN PAM targeting sequence
  source 1..20: mol_type = other RNA
gttcagatcatatcacatgt

SEQ ID NO: 17183 - RNA, 20 nt, synthetic construct
  misc_feature 1..20: note = C9Orf72 CTCN PAM targeting sequence
  source 1..20: mol_type = other RNA
acagctctgttcagatcata

SEQ ID NO: 17184 - RNA, 20 nt, synthetic construct
  misc_feature 1..20: note = C9Orf72 CTCN PAM targeting sequence
  source 1..20: mol_type = other RNA
tgactccacagctctgttca

SEQ ID NO: 17185 - RNA, 20 nt, synthetic construct
  misc_feature 1..20: note = C9Orf72 CTCN PAM targeting sequence
  source 1..20: mol_type = other RNA
cactatacaccctttgtttg

SEQ ID NO: 17186 - RNA, 20 nt, synthetic construct
  misc_feature 1..20: note = C9Orf72 CTCN PAM targeting sequence
  source 1..20: mol_type = other RNA
ttcgcttattgctgaatccc

SEQ ID NO: 17187 - RNA, 20 nt, synthetic construct
  misc_feature 1..20: note = C9Orf72 CTCN PAM targeting sequence
  source 1..20: mol_type = other RNA
cccaggtacagacacccaca

SEQ ID NO: 17188 - RNA, 20 nt, synthetic construct
  misc_feature 1..20: note = C9Orf72 CTCN PAM targeting sequence
  source 1..20: mol_type = other RNA
tcccctcaccctctctattt

SEQ ID NO: 17189 - RNA, 20 nt, synthetic construct
  misc_feature 1..20: note = C9Orf72 CTCN PAM targeting sequence
  source 1..20: mol_type = other RNA
ccctctctattttcccactt

SEQ ID NO: 17190 - RNA, 20 nt, synthetic construct
  misc_feature 1..20: note = C9Orf72 CTCN PAM targeting sequence
  source 1..20: mol_type = other RNA
agcagtggcatgatcatggc

SEQ ID NO: 17191 - RNA, 20 nt, synthetic construct
  misc_feature 1..20: note = C9Orf72 CTCN PAM targeting sequence
  source 1..20: mol_type = other RNA
ctgcagcctcgacctcccag

SEQ ID NO: 17192 - RNA, 20 nt, synthetic construct
  misc_feature 1..20: note = C9Orf72 CTCN PAM targeting sequence
  source 1..20: mol_type = other RNA
acctcccaggttcaaacgat

SEQ ID NO: 17193 - RNA, 20 nt, synthetic construct
  misc_feature 1..20: note = C9Orf72 CTCN PAM targeting sequence
  source 1..20: mol_type = other RNA
caggttcaaacgatcctcct

SEQ ID NO: 17194 - RNA, 20 nt, synthetic construct
  misc_feature 1..20: note = C9Orf72 CTCN PAM targeting sequence
  source 1..20: mol_type = other RNA
tgtctcagccttctaagtac

SEQ ID NO: 17195 - RNA, 20 nt, synthetic construct
  misc_feature 1..20: note = C9Orf72 CTCN PAM targeting sequence
  source 1..20: mol_type = other RNA
gccttctaagtaccagggac

SEQ ID NO: 17196 - RNA, 20 nt, synthetic construct
  misc_feature 1..20: note = C9Orf72 CTCN PAM targeting sequence
  source 1..20: mol_type = other RNA
acaaaatacaagataaaata

SEQ ID NO: 17197 - RNA, 20 nt, synthetic construct
  misc_feature 1..20: note = C9Orf72 CTCN PAM targeting sequence
  source 1..20: mol_type = other RNA
ctttgttgcctaggctggtc

SEQ ID NO: 17198 - RNA, 20 nt, synthetic construct
  misc_feature 1..20: note = C9Orf72 CTCN PAM targeting sequence
  source 1..20: mol_type = other RNA
tgacctcaagcaatcctccc

SEQ ID NO: 17199 - RNA, 20 nt, synthetic construct
  misc_feature 1..20: note = C9Orf72 CTCN PAM targeting sequence
  source 1..20: mol_type = other RNA
agcaatcctcccgctctggc

SEQ ID NO: 17200 - RNA, 20 nt, synthetic construct
  misc_feature 1..20: note = C9Orf72 CTCN PAM targeting sequence
  source 1..20: mol_type = other RNA
cgctctggcctgataccagt

SEQ ID NO: 17201 - RNA, 20 nt, synthetic construct
  misc_feature 1..20: note = C9Orf72 CTCN PAM targeting sequence
  source 1..20: mol_type = other RNA
ggcctgataccagtctcttg

SEQ ID NO: 17202 - RNA, 20 nt, synthetic construct
  misc_feature 1..20: note = C9Orf72 CTCN PAM targeting sequence
  source 1..20: mol_type = other RNA
tgaactggaaggacaggtgg

SEQ ID NO: 17203 - RNA, 20 nt, synthetic construct
  misc_feature 1..20: note = C9Orf72 CTCN PAM targeting sequence
  source 1..20: mol_type = other RNA
attttacagacaaggaaaca

SEQ ID NO: 17204 - RNA, 20 nt, synthetic construct
  misc_feature 1..20: note = C9Orf72 CTCN PAM targeting sequence
  source 1..20: mol_type = other RNA
gtttccttgtctgtaaaatg

SEQ ID NO: 17205 - RNA, 20 nt, synthetic construct
  misc_feature 1..20: note = C9Orf72 CTCN PAM targeting sequence
  source 1..20: mol_type = other RNA
gatctcctagtgcttgattc

SEQ ID NO: 17206 - RNA, 20 nt, synthetic construct
  misc_feature 1..20: note = C9Orf72 CTCN PAM targeting sequence
  source 1..20: mol_type = other RNA
tagtgcttgattcaaatttg

SEQ ID NO: 17207 - RNA, 20 nt, synthetic construct
  misc_feature 1..20: note = C9Orf72 CTCN PAM targeting sequence
  source 1..20: mol_type = other RNA
tgtctgaccatgtcagaatc

SEQ ID NO: 17208 - RNA, 20 nt, synthetic construct
  misc_feature 1..20: note = C9Orf72 CTCN PAM targeting sequence
  source 1..20: mol_type = other RNA
ttaggtcaaacttttgaatc

SEQ ID NO: 17209 - RNA, 20 nt, synthetic construct
  misc_feature 1..20: note = C9Orf72 CTCN PAM targeting sequence
  source 1..20: mol_type = other RNA
ttgttctgtcgttcagtggc

SEQ ID NO: 17210 - RNA, 20 nt, synthetic construct
  misc_feature 1..20: note = C9Orf72 CTCN PAM targeting sequence
  source 1..20: mol_type = other RNA
ggaaaagacacagatgggtg

SEQ ID NO: 17211 - RNA, 20 nt, synthetic construct
  misc_feature 1..20: note = C9Orf72 CTCN PAM targeting sequence
  source 1..20: mol_type = other RNA
cactcaggaaaagacacaga

SEQ ID NO: 17212 - RNA, 20 nt, synthetic construct
  misc_feature 1..20: note = C9Orf72 CTCN PAM targeting sequence
  source 1..20: mol_type = other RNA
ggtacctgcgccaatatggc

SEQ ID NO: 17213 - RNA, 20 nt, synthetic construct
  misc_feature 1..20: note = C9Orf72 CTCN PAM targeting sequence
  source 1..20: mol_type = other RNA
caggtacctgcgccaatatg

SEQ ID NO: 17214 - RNA, 20 nt, synthetic construct
  misc_feature 1..20: note = C9Orf72 CTCN PAM targeting sequence
  source 1..20: mol_type = other RNA
gggctgggaaagtaagtcca

SEQ ID NO: 17215 - RNA, 20 nt, synthetic construct
  misc_feature 1..20: note = C9Orf72 CTCN PAM targeting sequence
  source 1..20: mol_type = other RNA
gggatcttgttaaaatgcag

SEQ ID NO: 17216 - RNA, 20 nt, synthetic construct
  misc_feature 1..20: note = C9Orf72 CTCN PAM targeting sequence
  source 1..20: mol_type = other RNA
caggtggtactgaatctact

SEQ ID NO: 17217 - RNA, 20 nt, synthetic construct
  misc_feature 1..20: note = C9Orf72 CTCN PAM targeting sequence
  source 1..20: mol_type = other RNA
aagcatcaaggcctgatcta

SEQ ID NO: 17218 - RNA, 20 nt, synthetic construct
  misc_feature 1..20: note = C9Orf72 CTCN PAM targeting sequence
  source 1..20: mol_type = other RNA
caggcttcaccccaaacctg

SEQ ID NO: 17219 - RNA, 20 nt, synthetic construct
  misc_feature 1..20: note = C9Orf72 CTCN PAM targeting sequence
  source 1..20: mol_type = other RNA
ggcttcaccccaaacctggt

SEQ ID NO: 17220 - RNA, 20 nt, synthetic construct
  misc_feature 1..20: note = C9Orf72 CTCN PAM targeting sequence
  source 1..20: mol_type = other RNA
aaagtatatgatctgagaag

SEQ ID NO: 17221 - RNA, 20 nt, synthetic construct
  misc_feature 1..20: note = C9Orf72 CTCN PAM targeting sequence
  source 1..20: mol_type = other RNA
gatcatatacttttgagatt

SEQ ID NO: 17222 - RNA, 20 nt, synthetic construct
  misc_feature 1..20: note = C9Orf72 CTCN PAM targeting sequence
  source 1..20: mol_type = other RNA
aacccagcacttctcagatc

SEQ ID NO: 17223 - RNA, 20 nt, synthetic construct
  misc_feature 1..20: note = C9Orf72 CTCN PAM targeting sequence
  source 1..20: mol_type = other RNA
gccaggcaggcagccctcca

SEQ ID NO: 17224 - RNA, 20 nt, synthetic construct
  misc_feature 1..20: note = C9Orf72 CTCN PAM targeting sequence
  source 1..20: mol_type = other RNA
actgaagactgtttatgaaa

SEQ ID NO: 17225 - RNA, 20 nt, synthetic construct
  misc_feature 1..20: note = C9Orf72 CTCN PAM targeting sequence
  source 1..20: mol_type = other RNA
aacatacccacactcaactg

SEQ ID NO: 17226 - RNA, 20 nt, synthetic construct
  misc_feature 1..20: note = C9Orf72 CTCN PAM targeting sequence
  source 1..20: mol_type = other RNA
tttttttttctcgaacatac

SEQ ID NO: 17227 - RNA, 20 nt, synthetic construct
  misc_feature 1..20: note = C9Orf72 CTCN PAM targeting sequence
  source 1..20: mol_type = other RNA
catttttttttctcgaacat

SEQ ID NO: 17228 - RNA, 20 nt, synthetic construct
  misc_feature 1..20: note = C9Orf72 CTCN PAM targeting sequence
  source 1..20: mol_type = other RNA
taggtgctgggtgctgggct

SEQ ID NO: 17229 - RNA, 20 nt, synthetic construct
  misc_feature 1..20: note = C9Orf72 CTCN PAM targeting sequence
  source 1..20: mol_type = other RNA
agtgaataccttttcataaa

SEQ ID NO: 17230 - RNA, 20 nt, synthetic construct
  misc_feature 1..20: note = C9Orf72 CTCN PAM targeting sequence
  source 1..20: mol_type = other RNA
acctggcatttatgaaaagg

SEQ ID NO: 17231 - RNA, 20 nt, synthetic construct
  misc_feature 1..20: note = C9Orf72 CTCN PAM targeting sequence
  source 1..20: mol_type = other RNA
agcagaaaggtttctttggc

SEQ ID NO: 17232 - RNA, 20 nt, synthetic construct
  misc_feature 1..20: note = C9Orf72 CTCN PAM targeting sequence
  source 1..20: mol_type = other RNA
aaaaaaaaaaaaaaaaaaaa

SEQ ID NO: 17233 - RNA, 20 nt, synthetic construct
  misc_feature 1..20: note = C9Orf72 CTCN PAM targeting sequence
  source 1..20: mol_type = other RNA
atgtccttagtgcctagccc

SEQ ID NO: 17234 - RNA, 20 nt, synthetic construct
  misc_feature 1..20: note = C9Orf72 CTCN PAM targeting sequence
  source 1..20: mol_type = other RNA
aaactacataccaaattgtg

SEQ ID NO: 17235 - RNA, 20 nt, synthetic construct
  misc_feature 1..20: note = C9Orf72 CTCN PAM targeting sequence
  source 1..20: mol_type = other RNA
ttcagagtattacttaggtc

SEQ ID NO: 17236 - RNA, 20 nt, synthetic construct
  misc_feature 1..20: note = C9Orf72 CTCN PAM targeting sequence
  source 1..20: mol_type = other RNA
gaaggagtcacatcagtatg

SEQ ID NO: 17237 - RNA, 20 nt, synthetic construct
  misc_feature 1..20: note = C9Orf72 CTCN PAM targeting sequence
  source 1..20: mol_type = other RNA
ccctttattgtcctgtttca

SEQ ID NO: 17238 - RNA, 20 nt, synthetic construct
  misc_feature 1..20: note = C9Orf72 CTCN PAM targeting sequence
  source 1..20: mol_type = other RNA
ttccaaagacctcacccttt

SEQ ID NO: 17239 - RNA, 20 nt, synthetic construct
  misc_feature 1..20: note = C9Orf72 CTCN PAM targeting sequence
  source 1..20: mol_type = other RNA
ccatattttctgcctaatag

SEQ ID NO: 17240 - RNA, 20 nt, synthetic construct
  misc_feature 1..20: note = C9Orf72 CTCN PAM targeting sequence
  source 1..20: mol_type = other RNA
atattttctgcctaatagat

SEQ ID NO: 17241 - RNA, 20 nt, synthetic construct
  misc_feature 1..20: note = C9Orf72 CTCN PAM targeting sequence
  source 1..20: mol_type = other RNA
gcatgtttttatagtgcaca

SEQ ID NO: 17242 - RNA, 20 nt, synthetic construct
  misc_feature 1..20: note = C9Orf72 CTCN PAM targeting sequence
  source 1..20: mol_type = other RNA
ctgcatgtttttatagtgca

SEQ ID NO: 17243 - RNA, 20 nt, synthetic construct
  misc_feature 1..20: note = C9Orf72 CTCN PAM targeting sequence
  source 1..20: mol_type = other RNA
ttagttgagaaatcaaagag

SEQ ID NO: 17244 - RNA, 20 nt, synthetic construct
  misc_feature 1..20: note = C9Orf72 CTCN PAM targeting sequence
  source 1..20: mol_type = other RNA
actaatgaggcaaaagacat

SEQ ID NO: 17245 - RNA, 20 nt, synthetic construct
  misc_feature 1..20: note = C9Orf72 CTCN PAM targeting sequence
  source 1..20: mol_type = other RNA
ttgatttctcaactaatgag

SEQ ID NO: 17246 - RNA, 20 nt, synthetic construct
  misc_feature 1..20: note = C9Orf72 CTCN PAM targeting sequence
  source 1..20: mol_type = other RNA
cccagtcactcctgagagat

SEQ ID NO: 17247 - RNA, 20 nt, synthetic construct
  misc_feature 1..20: note = C9Orf72 CTCN PAM targeting sequence
  source 1..20: mol_type = other RNA
cagtcactcctgagagatcc

SEQ ID NO: 17248 - RNA, 20 nt, synthetic construct
  misc_feature 1..20: note = C9Orf72 CTCN PAM targeting sequence
  source 1..20: mol_type = other RNA
tgagagatccatcttctcta

SEQ ID NO: 17249 - RNA, 20 nt, synthetic construct
  misc_feature 1..20: note = C9Orf72 CTCN PAM targeting sequence
  source 1..20: mol_type = other RNA
ggagtgactgggagagttgt

SEQ ID NO: 17250 - RNA, 20 nt, synthetic construct
  misc_feature 1..20: note = C9Orf72 CTCN PAM targeting sequence
  source 1..20: mol_type = other RNA
caggagtgactgggagagtt

SEQ ID NO: 17251 - RNA, 20 nt, synthetic construct
  misc_feature 1..20: note = C9Orf72 CTCN PAM targeting sequence
  source 1..20: mol_type = other RNA
agccaggcccacctctaaga

SEQ ID NO: 17252 - RNA, 20 nt, synthetic construct
  misc_feature 1..20: note = C9Orf72 CTCN PAM targeting sequence
  source 1..20: mol_type = other RNA
aagagaccttggtggtactg

SEQ ID NO: 17253 - RNA, 20 nt, synthetic construct
  misc_feature 1..20: note = C9Orf72 CTCN PAM targeting sequence
  source 1..20: mol_type = other RNA
tagaggtgggcctggctaga

SEQ ID NO: 17254 - RNA, 20 nt, synthetic construct
  misc_feature 1..20: note = C9Orf72 CTCN PAM targeting sequence
  source 1..20: mol_type = other RNA
cccttcagtaccaccaaggt

SEQ ID NO: 17255 - RNA, 20 nt, synthetic construct
  misc_feature 1..20: note = C9Orf72 CTCN PAM targeting sequence
  source 1..20: mol_type = other RNA
tttcctaaccccctcaccct

SEQ ID NO: 17256 - RNA, 20 nt, synthetic construct
  misc_feature 1..20: note = C9Orf72 CTCN PAM targeting sequence
  source 1..20: mol_type = other RNA
cctttcctaaccccctcacc

SEQ ID NO: 17257 - RNA, 20 nt, synthetic construct
  misc_feature 1..20: note = C9Orf72 CTCN PAM targeting sequence
  source 1..20: mol_type = other RNA
cagataagatattgaactgc

SEQ ID NO: 17258 - RNA, 20 nt, synthetic construct
  misc_feature 1..20: note = C9Orf72 CTCN PAM targeting sequence
  source 1..20: mol_type = other RNA
acctcacagataagatattg

SEQ ID NO: 17259 - RNA, 20 nt, synthetic construct
  misc_feature 1..20: note = C9Orf72 CTCN PAM targeting sequence
  source 1..20: mol_type = other RNA
tcctggcaggatcagctgcc

SEQ ID NO: 17260 - RNA, 20 nt, synthetic construct
  misc_feature 1..20: note = C9Orf72 CTCN PAM targeting sequence
  source 1..20: mol_type = other RNA
tggcaggatcagctgccagg

SEQ ID NO: 17261 - RNA, 20 nt, synthetic construct
  misc_feature 1..20: note = C9Orf72 CTCN PAM targeting sequence
  source 1..20: mol_type = other RNA
tatggccttcctataggaaa

SEQ ID NO: 17262 - RNA, 20 nt, synthetic construct
  misc_feature 1..20: note = C9Orf72 CTCN PAM targeting sequence
  source 1..20: mol_type = other RNA
ttcatgcggggtgtttctgg

SEQ ID NO: 17263 - RNA, 20 nt, synthetic construct
  misc_feature 1..20: note = C9Orf72 CTCN PAM targeting sequence
  source 1..20: mol_type = other RNA
gtgcctggcaatgaagatga

SEQ ID NO: 17264 - RNA, 20 nt, synthetic construct
  misc_feature 1..20: note = C9Orf72 CTCN PAM targeting sequence
  source 1..20: mol_type = other RNA
ttcattcagcaaacattcag

SEQ ID NO: 17265 - RNA, 20 nt, synthetic construct
  misc_feature 1..20: note = C9Orf72 CTCN PAM targeting sequence
  source 1..20: mol_type = other RNA
tttgtggtttcactgtgatg

SEQ ID NO: 17266 - RNA, 20 nt, synthetic construct
  misc_feature 1..20: note = C9Orf72 CTCN PAM targeting sequence
  source 1..20: mol_type = other RNA
tgtcttcagttatttgggga

SEQ ID NO: 17267 - RNA, 20 nt, synthetic construct
  misc_feature 1..20: note = C9Orf72 CTCN PAM targeting sequence
  source 1..20: mol_type = other RNA
atgtcaatctgtaagctcac

SEQ ID NO: 17268 - RNA, 20 nt, synthetic construct
  misc_feature 1..20: note = C9Orf72 CTCN PAM targeting sequence
  source 1..20: mol_type = other RNA
ctgccaactcactgaggccg

SEQ ID NO: 17269 - RNA, 20 nt, synthetic construct
  misc_feature 1..20: note = C9Orf72 CTCN PAM targeting sequence
  source 1..20: mol_type = other RNA
ctgaggccgctgggataccc

SEQ ID NO: 17270 - RNA, 20 nt, synthetic construct
  misc_feature 1..20: note = C9Orf72 CTCN PAM targeting sequence
  source 1..20: mol_type = other RNA
gtgagttggcagtgagctta

SEQ ID NO: 17271 - RNA, 20 nt, synthetic construct
  misc_feature 1..20: note = C9Orf72 CTCN PAM targeting sequence
  source 1..20: mol_type = other RNA
tgaaaggacaagacttcagc

SEQ ID NO: 17272 - RNA, 20 nt, synthetic construct
  misc_feature 1..20: note = C9Orf72 CTCN PAM targeting sequence
  source 1..20: mol_type = other RNA
acttttctttcaaatgagct

SEQ ID NO: 17273 - RNA, 20 nt, synthetic construct
  misc_feature 1..20: note = C9Orf72 CTCN PAM targeting sequence
  source 1..20: mol_type = other RNA
tttgaaagaaaagttgagct

SEQ ID NO: 17274 - RNA, 20 nt, synthetic construct
  misc_feature 1..20: note = C9Orf72 CTCN PAM targeting sequence
  source 1..20: mol_type = other RNA
attcctctgtgttatctgaa

SEQ ID NO: 17275 - RNA, 20 nt, synthetic construct
  misc_feature 1..20: note = C9Orf72 CTCN PAM targeting sequence
  source 1..20: mol_type = other RNA
gtgttatctgaaattccacc

SEQ ID NO: 17276 - RNA, 20 nt, synthetic construct
  misc_feature 1..20: note = C9Orf72 CTCN PAM targeting sequence
  source 1..20: mol_type = other RNA
tcagaatcaaagaatgacca

SEQ ID NO: 17277 - RNA, 20 nt, synthetic construct
  misc_feature 1..20: note = C9Orf72 CTCN PAM targeting sequence
  source 1..20: mol_type = other RNA
ttttcccactatattgttct

SEQ ID NO: 17278 - RNA, 20 nt, synthetic construct
  misc_feature 1..20: note = C9Orf72 CTCN PAM targeting sequence
  source 1..20: mol_type = other RNA
ttatagctggaatagtcctt

SEQ ID NO: 17279 - RNA, 20 nt, synthetic construct
  misc_feature 1..20: note = C9Orf72 CTCN PAM targeting sequence
  source 1..20: mol_type = other RNA
cacttcccaaatattgaatt

SEQ ID NO: 17280 - RNA, 20 nt, synthetic construct
  misc_feature 1..20: note = C9Orf72 CTCN PAM targeting sequence
  source 1..20: mol_type = other RNA
aaaataaaaacccaatctac

SEQ ID NO: 17281 - RNA, 20 nt, synthetic construct
  misc_feature 1..20: note = C9Orf72 CTCN PAM targeting sequence
  source 1..20: mol_type = other RNA
tccattctggggttgtcctg

SEQ ID NO: 17282 - RNA, 20 nt, synthetic construct
  misc_feature 1..20: note = C9Orf72 CTCN PAM targeting sequence
  source 1..20: mol_type = other RNA
ggcaggaatctcttccattc

SEQ ID NO: 17283 - RNA, 20 nt, synthetic construct
  misc_feature 1..20: note = C9Orf72 CTCN PAM targeting sequence
  source 1..20: mol_type = other RNA
tcaactttgagctgtcatat

SEQ ID NO: 17284 - RNA, 20 nt, synthetic construct
  misc_feature 1..20: note = C9Orf72 CTCN PAM targeting sequence
  source 1..20: mol_type = other RNA
actttgagctgtcatatcac

SEQ ID NO: 17285 - RNA, 20 nt, synthetic construct
  misc_feature 1..20: note = C9Orf72 CTCN PAM targeting sequence
  source 1..20: mol_type = other RNA
aagttgaggagttgaattcg

SEQ ID NO: 17286 - RNA, 20 nt, synthetic construct
  misc_feature 1..20: note = C9Orf72 CTCN PAM targeting sequence
  source 1..20: mol_type = other RNA
caactaatgtaacaaaatgc

SEQ ID NO: 17287 - RNA, 20 nt, synthetic construct
  misc_feature 1..20: note = C9Orf72 CTCN PAM targeting sequence
  source 1..20: mol_type = other RNA
ttttaatcttcaaagatatg

SEQ ID NO: 17288 - RNA, 20 nt, synthetic construct
  misc_feature 1..20: note = C9Orf72 CTCN PAM targeting sequence
  source 1..20: mol_type = other RNA
gaaaccatgcatatctttga

SEQ ID NO: 17289 - RNA, 20 nt, synthetic construct
  misc_feature 1..20: note = C9Orf72 CTCN PAM targeting sequence
  source 1..20: mol_type = other RNA
cattatttctgaacacagat

SEQ ID NO: 17290 - RNA, 20 nt, synthetic construct
  misc_feature 1..20: note = C9Orf72 CTCN PAM targeting sequence
  source 1..20: mol_type = other RNA
tcttctagctcttcaatggt

SEQ ID NO: 17291 - RNA, 20 nt, synthetic construct
  misc_feature 1..20: note = C9Orf72 CTCN PAM targeting sequence
  source 1..20: mol_type = other RNA
tcaatggtcgtttgaattgc

SEQ ID NO: 17292 - RNA, 20 nt, synthetic construct
  misc_feature 1..20: note = C9Orf72 CTCN PAM targeting sequence
  source 1..20: mol_type = other RNA
tctgaatgatgatgaatcat

SEQ ID NO: 17293 - RNA, 20 nt, synthetic construct
  misc_feature 1..20: note = C9Orf72 CTCN PAM targeting sequence
  source 1..20: mol_type = other RNA
ccactaagtgtcctcttctg

SEQ ID NO: 17294 - RNA, 20 nt, synthetic construct
  misc_feature 1..20: note = C9Orf72 CTCN PAM targeting sequence
  source 1..20: mol_type = other RNA
ttccattctttctcaccact

SEQ ID NO: 17295 - RNA, 20 nt, synthetic construct
  misc_feature 1..20: note = C9Orf72 CTCN PAM targeting sequence
  source 1..20: mol_type = other RNA
tttcttttactctttccatt

SEQ ID NO: 17296 - RNA, 20 nt, synthetic construct
  misc_feature 1..20: note = C9Orf72 CTCN PAM targeting sequence
  source 1..20: mol_type = other RNA
gtcttttgttccatggactg

SEQ ID NO: 17297 - RNA, 20 nt, synthetic construct
  misc_feature 1..20: note = C9Orf72 CTCN PAM targeting sequence
  source 1..20: mol_type = other RNA
ttatttcagaaaacattttt

SEQ ID NO: 17298 - RNA, 20 nt, synthetic construct
  misc_feature 1..20: note = C9Orf72 CTCN PAM targeting sequence
  source 1..20: mol_type = other RNA
gatgacctatttaatcttat

SEQ ID NO: 17299 - RNA, 20 nt, synthetic construct
  misc_feature 1..20: note = C9Orf72 CTCN PAM targeting sequence
  source 1..20: mol_type = other RNA
ttcttttaaaaaaaatcagt

SEQ ID NO: 17300 - RNA, 20 nt, synthetic construct
  misc_feature 1..20: note = C9Orf72 CTCN PAM targeting sequence
  source 1..20: mol_type = other RNA
aagtcagtgagagatttggt

SEQ ID NO: 17301 - RNA, 20 nt, synthetic construct
  misc_feature 1..20: note = C9Orf72 CTCN PAM targeting sequence
  source 1..20: mol_type = other RNA
ctgacttagagaagtttctc

SEQ ID NO: 17302 - RNA, 20 nt, synthetic construct
  misc_feature 1..20: note = C9Orf72 CTCN PAM targeting sequence
  source 1..20: mol_type = other RNA
cactgacttagagaagtttc

SEQ ID NO: 17303 - RNA, 20 nt, synthetic construct
  misc_feature 1..20: note = C9Orf72 CTCN PAM targeting sequence
  source 1..20: mol_type = other RNA
cctgacttagatattgtttt

SEQ ID NO: 17304 - RNA, 20 nt, synthetic construct
  misc_feature 1..20: note = C9Orf72 CTCN PAM targeting sequence
  source 1..20: mol_type = other RNA
tcccatcccccattcttcta

SEQ ID NO: 17305 - RNA, 20 nt, synthetic construct
  misc_feature 1..20: note = C9Orf72 CTCN PAM targeting sequence
  source 1..20: mol_type = other RNA
tgctttaaaaagtaaaaata

SEQ ID NO: 17306 - RNA, 20 nt, synthetic construct
  misc_feature 1..20: note = C9Orf72 CTCN PAM targeting sequence
  source 1..20: mol_type = other RNA
gaaccttgaacggatattga

SEQ ID NO: 17307 - RNA, 20 nt, synthetic construct
  misc_feature 1..20: note = C9Orf72 CTCN PAM targeting sequence
  source 1..20: mol_type = other RNA
atatccgttcaaggttcaga

SEQ ID NO: 17308 - RNA, 20 nt, synthetic construct
  misc_feature 1..20: note = C9Orf72 CTCN PAM targeting sequence
  source 1..20: mol_type = other RNA
gaaccttcagtggatactgg

SEQ ID NO: 17309 - RNA, 20 nt, synthetic construct
  misc_feature 1..20: note = C9Orf72 CTCN PAM targeting sequence
  source 1..20: mol_type = other RNA
tagccactaagtgaacttga

SEQ ID NO: 17310 - RNA, 20 nt, synthetic construct
  misc_feature 1..20: note = C9Orf72 CTCN PAM targeting sequence
  source 1..20: mol_type = other RNA
agttcacttagtggctaaga

SEQ ID NO: 17311 - RNA, 20 nt, synthetic construct
  misc_feature 1..20: note = C9Orf72 CTCN PAM targeting sequence
  source 1..20: mol_type = other RNA
aagtctgaaaaatttctagc

SEQ ID NO: 17312 - RNA, 20 nt, synthetic construct
  misc_feature 1..20: note = C9Orf72 CTCN PAM targeting sequence
  source 1..20: mol_type = other RNA
tggtgctagggctagaaatt

SEQ ID NO: 17313 - RNA, 20 nt, synthetic construct
  misc_feature 1..20: note = C9Orf72 CTCN PAM targeting sequence
  source 1..20: mol_type = other RNA
accttcctgcaaagatcttt

SEQ ID NO: 17314 - RNA, 20 nt, synthetic construct
  misc_feature 1..20: note = C9Orf72 CTCN PAM targeting sequence
  source 1..20: mol_type = other RNA
tggtgttaattttacctatc

SEQ ID NO: 17315 - RNA, 20 nt, synthetic construct
  misc_feature 1..20: note = C9Orf72 CTCN PAM targeting sequence
  source 1..20: mol_type = other RNA
taatcttgcctgctcttggt

SEQ ID NO: 17316 - RNA, 20 nt, synthetic construct
  misc_feature 1..20: note = C9Orf72 CTCN PAM targeting sequence
  source 1..20: mol_type = other RNA
agtaaaacttgtatcataat

SEQ ID NO: 17317 - RNA, 20 nt, synthetic construct
  misc_feature 1..20: note = C9Orf72 CTCN PAM targeting sequence
  source 1..20: mol_type = other RNA
ctagtaaaacttgtatcata

SEQ ID NO: 17318 - RNA, 20 nt, synthetic construct
  misc_feature 1..20: note = C9Orf72 CTCN PAM targeting sequence
  source 1..20: mol_type = other RNA
agaatctgactctctagtaa

SEQ ID NO: 17319 - RNA, 20 nt, synthetic construct
  misc_feature 1..20: note = C9Orf72 CTCN PAM targeting sequence
  source 1..20: mol_type = other RNA
caagaatctgactctctagt

SEQ ID NO: 17320 - RNA, 20 nt, synthetic construct
  misc_feature 1..20: note = C9Orf72 CTCN PAM targeting sequence
  source 1..20: mol_type = other RNA
gtttccttaagcgtaaatta

SEQ ID NO: 17321 - RNA, 20 nt, synthetic construct
  misc_feature 1..20: note = C9Orf72 CTCN PAM targeting sequence
  source 1..20: mol_type = other RNA
ctgtgtctcagtttccttaa

SEQ ID NO: 17322 - RNA, 20 nt, synthetic construct
  misc_feature 1..20: note = C9Orf72 CTCN PAM targeting sequence
  source 1..20: mol_type = other RNA
aaacctcttaccacctactt

SEQ ID NO: 17323 - RNA, 20 nt, synthetic construct
  misc_feature 1..20: note = C9Orf72 CTCN PAM targeting sequence
  source 1..20: mol_type = other RNA
taccacctacttaaaagtgc

SEQ ID NO: 17324 - RNA, 20 nt, synthetic construct
  misc_feature 1..20: note = C9Orf72 CTCN PAM targeting sequence
  source 1..20: mol_type = other RNA
ttagacagttgggtagttaa

SEQ ID NO: 17325 - RNA, 20 nt, synthetic construct
  misc_feature 1..20: note = C9Orf72 CTCN PAM targeting sequence
  source 1..20: mol_type = other RNA
gttttgttttttttctttaa

SEQ ID NO: 17326 - RNA, 20 nt, synthetic construct
  misc_feature 1..20: note = C9Orf72 CTCN PAM targeting sequence
  source 1..20: mol_type = other RNA
ctgacccccttaggtgtacc

SEQ ID NO: 17327 - RNA, 20 nt, synthetic construct
  misc_feature 1..20: note = C9Orf72 CTCN PAM targeting sequence
  source 1..20: mol_type = other RNA
catttcctccctgaccccct

SEQ ID NO: 17328 - RNA, 20 nt, synthetic construct
  misc_feature 1..20: note = C9Orf72 CTCN PAM targeting sequence
  source 1..20: mol_type = other RNA
gtttctcccatttcctccct

SEQ ID NO: 17329 - RNA, 20 nt, synthetic construct
  misc_feature 1..20: note = C9Orf72 CTCN PAM targeting sequence
  source 1..20: mol_type = other RNA
agaagagatctatttctgga

SEQ ID NO: 17330 - RNA, 20 nt, synthetic construct
  misc_feature 1..20: note = C9Orf72 CTCN PAM targeting sequence
  source 1..20: mol_type = other RNA
tctggagtggcacatgacaa

SEQ ID NO: 17331 - RNA, 20 nt, synthetic construct
  misc_feature 1..20: note = C9Orf72 CTCN PAM targeting sequence
  source 1..20: mol_type = other RNA
gttttgtcttctttaaagat

SEQ ID NO: 17332 - RNA, 20 nt, synthetic construct
  misc_feature 1..20: note = C9Orf72 CTCN PAM targeting sequence
  source 1..20: mol_type = other RNA
cgtctgtaatcctaacactt

SEQ ID NO: 17333 - RNA, 20 nt, synthetic construct
  misc_feature 1..20: note = C9Orf72 CTCN PAM targeting sequence
  source 1..20: mol_type = other RNA
gcttcccaaagtgttaggat

SEQ ID NO: 17334 - RNA, 20 nt, synthetic construct
  misc_feature 1..20: note = C9Orf72 CTCN PAM targeting sequence
  source 1..20: mol_type = other RNA
agcaatcagcctggctcagc

SEQ ID NO: 17335 - RNA, 20 nt, synthetic construct
  misc_feature 1..20: note = C9Orf72 CTCN PAM targeting sequence
  source 1..20: mol_type = other RNA
tgggctcaagcaatcagcct

SEQ ID NO: 17336 - RNA, 20 nt, synthetic construct
  misc_feature 1..20: note = C9Orf72 CTCN PAM targeting sequence
  source 1..20: mol_type = other RNA
aactcctgggctcaagcaat

SEQ ID NO: 17337 - RNA, 20 nt, synthetic construct
  misc_feature 1..20: note = C9Orf72 CTCN PAM targeting sequence
  source 1..20: mol_type = other RNA
tctctacaaaaaatacaaaa

SEQ ID NO: 17338 - RNA, 20 nt, synthetic construct
  misc_feature 1..20: note = C9Orf72 CTCN PAM targeting sequence
  source 1..20: mol_type = other RNA
acaaaaaatacaaaaattag

SEQ ID NO: 17339 - RNA, 20 nt, synthetic construct
  misc_feature 1..20: note = C9Orf72 CTCN PAM targeting sequence
  source 1..20: mol_type = other RNA
caagtagctgggactacagg

SEQ ID NO: 17340 - RNA, 20 nt, synthetic construct
  misc_feature 1..20: note = C9Orf72 CTCN PAM targeting sequence
  source 1..20: mol_type = other RNA
gcctcccaagtagctgggac

SEQ ID NO: 17341 - RNA, 20 nt, synthetic construct
  misc_feature 1..20: note = C9Orf72 CTCN PAM targeting sequence
  source 1..20: mol_type = other RNA
cacctcagcctcccaagtag

SEQ ID NO: 17342 - RNA, 20 nt, synthetic construct
  misc_feature 1..20: note = C9Orf72 CTCN PAM targeting sequence
  source 1..20: mol_type = other RNA
ggtgatcctcccacctcagc

SEQ ID NO: 17343 - RNA, 20 nt, synthetic construct
  misc_feature 1..20: note = C9Orf72 CTCN PAM targeting sequence
  source 1..20: mol_type = other RNA
ctgcagtctggacatcccca

SEQ ID NO: 17344 - RNA, 20 nt, synthetic construct
  misc_feature 1..20: note = C9Orf72 CTCN PAM targeting sequence
  source 1..20: mol_type = other RNA
agcctgggcagcagcatgag

SEQ ID NO: 17345 - RNA, 20 nt, synthetic construct
  misc_feature 1..20: note = C9Orf72 CTCN PAM targeting sequence
  source 1..20: mol_type = other RNA
tgctgctgcccaggctggag

SEQ ID NO: 17346 - RNA, 20 nt, synthetic construct
  misc_feature 1..20: note = C9Orf72 CTCN PAM targeting sequence
  source 1..20: mol_type = other RNA
aaaaaaagaaaaaagaaaaa

SEQ ID NO: 17347 - RNA, 20 nt, synthetic construct
  misc_feature 1..20: note = C9Orf72 CTCN PAM targeting sequence
  source 1..20: mol_type = other RNA
tctaattttcacagtaacct

SEQ ID NO: 17348 - RNA, 20 nt, synthetic construct
  misc_feature 1..20: note = C9Orf72 CTCN PAM targeting sequence
  source 1..20: mol_type = other RNA
catcatttcttgatattaag

SEQ ID NO: 17349 - RNA, 20 nt, synthetic construct
  misc_feature 1..20: note = C9Orf72 CTCN PAM targeting sequence
  source 1..20: mol_type = other RNA
tgcctatttcttattcgtaa

SEQ ID NO: 17350 - RNA, 20 nt, synthetic construct
  misc_feature 1..20: note = C9Orf72 CTCN PAM targeting sequence
  source 1..20: mol_type = other RNA
tatgcagggcttccattgcc

SEQ ID NO: 17351 - RNA, 20 nt, synthetic construct
  misc_feature 1..20: note = C9Orf72 CTCN PAM targeting sequence
  source 1..20: mol_type = other RNA
ggcaaaaagaaataatatta

SEQ ID NO: 17352 - RNA, 20 nt, synthetic construct
  misc_feature 1..20: note = C9Orf72 CTCN PAM targeting sequence
  source 1..20: mol_type = other RNA
gtgatttgataatgagttaa

SEQ ID NO: 17353 - RNA, 20 nt, synthetic construct
  misc_feature 1..20: note = C9Orf72 CTCN PAM targeting sequence
  source 1..20: mol_type = other RNA
ttatcaaatcactgaggtta

SEQ ID NO: 17354 - RNA, 20 nt, synthetic construct
  misc_feature 1..20: note = C9Orf72 CTCN PAM targeting sequence
  source 1..20: mol_type = other RNA
aaatattagggtaagtgtgt

SEQ ID NO: 17355 - RNA, 20 nt, synthetic construct
  misc_feature 1..20: note = C9Orf72 CTCN PAM targeting sequence
  source 1..20: mol_type = other RNA
ctcaaaatattagggtaagt

SEQ ID NO: 17356 - RNA, 20 nt, synthetic construct
  misc_feature 1..20: note = C9Orf72 CTCN PAM targeting sequence
  source 1..20: mol_type = other RNA
cactaatccctcaaacactt

SEQ ID NO: 17357 - RNA, 20 nt, synthetic construct
  misc_feature 1..20: note = C9Orf72 CTCN PAM targeting sequence
  source 1..20: mol_type = other RNA
aacacttttcagaatagcat

SEQ ID NO: 17358 - RNA, 20 nt, synthetic construct
  misc_feature 1..20: note = C9Orf72 CTCN PAM targeting sequence
  source 1..20: mol_type = other RNA
acatttaacacattacattc

SEQ ID NO: 17359 - RNA, 20 nt, synthetic construct
  misc_feature 1..20: note = C9Orf72 CTCN PAM targeting sequence
  source 1..20: mol_type = other RNA
gtattctgataacagaaatg

SEQ ID NO: 17360 - RNA, 20 nt, synthetic construct
  misc_feature 1..20: note = C9Orf72 CTCN PAM targeting sequence
  source 1..20: mol_type = other RNA
ttttcatgctgctgataaag

SEQ ID NO: 17361 - RNA, 20 nt, synthetic construct
  misc_feature 1..20: note = C9Orf72 CTCN PAM targeting sequence
  source 1..20: mol_type = other RNA
ttttgttcccattttcaggt

SEQ ID NO: 17362 - RNA, 20 nt, synthetic construct
  misc_feature 1..20: note = C9Orf72 CTCN PAM targeting sequence
  source 1..20: mol_type = other RNA
ccagccatgtggaactgtaa

SEQ ID NO: 17363 - RNA, 20 nt, synthetic construct
  misc_feature 1..20: note = C9Orf72 CTCN PAM targeting sequence
  source 1..20: mol_type = other RNA
gaatcatggcgggaggtgga

SEQ ID NO: 17364 - RNA, 20 nt, synthetic construct
  misc_feature 1..20: note = C9Orf72 CTCN PAM targeting sequence
  source 1..20: mol_type = other RNA
cgccatgattctgaggcctc

SEQ ID NO: 17365 - RNA, 20 nt, synthetic construct
  misc_feature 1..20: note = C9Orf72 CTCN PAM targeting sequence
  source 1..20: mol_type = other RNA
tgctgctgccatgtaagaag

SEQ ID NO: 17366 - RNA, 20 nt, synthetic construct
  misc_feature 1..20: note = C9Orf72 CTCN PAM targeting sequence
  source 1..20: mol_type = other RNA
tttttctcttgctgctgcca

SEQ ID NO: 17367 - RNA, 20 nt, synthetic construct
  misc_feature 1..20: note = C9Orf72 CTCN PAM targeting sequence
  source 1..20: mol_type = other RNA
ttttttgcttcttcctcatt

SEQ ID NO: 17368 - RNA, 20 nt, synthetic construct
  misc_feature 1..20: note = C9Orf72 CTCN PAM targeting sequence
  source 1..20: mol_type = other RNA
tgagacttattcactatcac

SEQ ID NO: 17369 - RNA, 20 nt, synthetic construct
  misc_feature 1..20: note = C9Orf72 CTCN PAM targeting sequence
  source 1..20: mol_type = other RNA
cgagatctgatgggtttatc

SEQ ID NO: 17370 - RNA, 20 nt, synthetic construct
  misc_feature 1..20: note = C9Orf72 CTCN PAM targeting sequence
  source 1..20: mol_type = other RNA
tgatagtgaataagtctcac

SEQ ID NO: 17371 - RNA, 20 nt, synthetic construct
  misc_feature 1..20: note = C9Orf72 CTCN PAM targeting sequence
  source 1..20: mol_type = other RNA
ccctgggtccctgccatagc

SEQ ID NO: 17372 - RNA, 20 nt, synthetic construct
  misc_feature 1..20: note = C9Orf72 CTCN PAM targeting sequence
  source 1..20: mol_type = other RNA
catgctatggcagggaccca

SEQ ID NO: 17373 - RNA, 20 nt, synthetic construct
  misc_feature 1..20: note = C9Orf72 CTCN PAM targeting sequence
  source 1..20: mol_type = other RNA
gggagatataattcaagttg

SEQ ID NO: 17374 - RNA, 20 nt, synthetic construct
  misc_feature 1..20: note = C9Orf72 CTCN PAM targeting sequence
  source 1..20: mol_type = other RNA
cagagttctcacatgctatg

SEQ ID NO: 17375 - RNA, 20 nt, synthetic construct
  misc_feature 1..20: note = C9Orf72 CTCN PAM targeting sequence
  source 1..20: mol_type = other RNA
acttgaattatatctcccag

SEQ ID NO: 17376 - RNA, 20 nt, synthetic construct
  misc_feature 1..20: note = C9Orf72 CTCN PAM targeting sequence
  source 1..20: mol_type = other RNA
aaatctcacgacctcacatt

SEQ ID NO: 17377 - RNA, 20 nt, synthetic construct
  misc_feature 1..20: note = C9Orf72 CTCN PAM targeting sequence
  source 1..20: mol_type = other RNA
cgacctcacatttcaaaacc

SEQ ID NO: 17378 - RNA, 20 nt, synthetic construct
  misc_feature 1..20: note = C9Orf72 CTCN PAM targeting sequence
  source 1..20: mol_type = other RNA
catttcaaaaccaatcatgc

SEQ ID NO: 17379 - RNA, 20 nt, synthetic construct
  misc_feature 1..20: note = C9Orf72 CTCN PAM targeting sequence
  source 1..20: mol_type = other RNA
tttcagcattaacccaaaag

SEQ ID NO: 17380 - RNA, 20 nt, synthetic construct
  misc_feature 1..20: note = C9Orf72 CTCN PAM targeting sequence
  source 1..20: mol_type = other RNA
tctgagacaaggcaagtccc

SEQ ID NO: 17381 - RNA, 20 nt, synthetic construct
  misc_feature 1..20: note = C9Orf72 CTCN PAM targeting sequence
  source 1..20: mol_type = other RNA
gatgagactttggactatgg

SEQ ID NO: 17382 - RNA, 20 nt, synthetic construct
  misc_feature 1..20: note = C9Orf72 CTCN PAM targeting sequence
  source 1..20: mol_type = other RNA
catttggaacagctgtattt

SEQ ID NO: 17383 - RNA, 20 nt, synthetic construct
  misc_feature 1..20: note = C9Orf72 CTCN PAM targeting sequence
  source 1..20: mol_type = other RNA
aaaatgatctcctttgactc

SEQ ID NO: 17384 - RNA, 20 nt, synthetic construct
  misc_feature 1..20: note = C9Orf72 CTCN PAM targeting sequence
  source 1..20: mol_type = other RNA
tttgactccaggtctgacat

SEQ ID NO: 17385 - RNA, 20 nt, synthetic construct
  misc_feature 1..20: note = C9Orf72 CTCN PAM targeting sequence
  source 1..20: mol_type = other RNA
aggtctgacatccaggtcat

SEQ ID NO: 17386 - RNA, 20 nt, synthetic construct
  misc_feature 1..20: note = C9Orf72 CTCN PAM targeting sequence
  source 1..20: mol_type = other RNA
acccctgtggctttgcaggg

SEQ ID NO: 17387 - RNA, 20 nt, synthetic construct
  misc_feature 1..20: note = C9Orf72 CTCN PAM targeting sequence
  source 1..20: mol_type = other RNA
ctgctggctgctttcatggg

SEQ ID NO: 17388 - RNA, 20 nt, synthetic construct
  misc_feature 1..20: note = C9Orf72 CTCN PAM targeting sequence
  source 1..20: mol_type = other RNA
tcttacagctccaccaagca

SEQ ID NO: 17389 - RNA, 20 nt, synthetic construct
  misc_feature 1..20: note = C9Orf72 CTCN PAM targeting sequence
  source 1..20: mol_type = other RNA
accaagcagtgccccagtag

SEQ ID NO: 17390 - RNA, 20 nt, synthetic construct
  misc_feature 1..20: note = C9Orf72 CTCN PAM targeting sequence
  source 1..20: mol_type = other RNA
gtgtgggggctccaacccca

SEQ ID NO: 17391 - RNA, 20 nt, synthetic construct
  misc_feature 1..20: note = C9Orf72 CTCN PAM targeting sequence
  source 1..20: mol_type = other RNA
aaccccacatttcccttctg

SEQ ID NO: 17392 - RNA, 20 nt, synthetic construct
  misc_feature 1..20: note = C9Orf72 CTCN PAM targeting sequence
  source 1..20: mol_type = other RNA
gctagggcagtgcagaaggg

SEQ ID NO: 17393 - RNA, 20 nt, synthetic construct
  misc_feature 1..20: note = C9Orf72 CTCN PAM targeting sequence
  source 1..20: mol_type = other RNA
atgagggtcccgcccctgca

SEQ ID NO: 17394 - RNA, 20 nt, synthetic construct
  misc_feature 1..20: note = C9Orf72 CTCN PAM targeting sequence
  source 1..20: mol_type = other RNA
tggagaacctccgctagggc

SEQ ID NO: 17395 - RNA, 20 nt, synthetic construct
  misc_feature 1..20: note = C9Orf72 CTCN PAM targeting sequence
  source 1..20: mol_type = other RNA
ccctagatttcagaagatgt

SEQ ID NO: 17396 - RNA, 20 nt, synthetic construct
  misc_feature 1..20: note = C9Orf72 CTCN PAM targeting sequence
  source 1..20: mol_type = other RNA
attcttgacttctgtgcacc

SEQ ID NO: 17397 - RNA, 20 nt, synthetic construct
  misc_feature 1..20: note = C9Orf72 CTCN PAM targeting sequence
  source 1..20: mol_type = other RNA
acaccacgtggaaactgcca

SEQ ID NO: 17398 - RNA, 20 nt, synthetic construct
  misc_feature 1..20: note = C9Orf72 CTCN PAM targeting sequence
  source 1..20: mol_type = other RNA
gaagccacaccctgagctct

SEQ ID NO: 17399 - RNA, 20 nt, synthetic construct
  misc_feature 1..20: note = C9Orf72 CTCN PAM targeting sequence
  source 1..20: mol_type = other RNA
gggtgtggcttcagagggtg

SEQ ID NO: 17400 - RNA, 20 nt, synthetic construct
  misc_feature 1..20: note = C9Orf72 CTCN PAM targeting sequence
  source 1..20: mol_type = other RNA
acgttggccctttcggccac

SEQ ID NO: 17401 - RNA, 20 nt, synthetic construct
  misc_feature 1..20: note = C9Orf72 CTCN PAM targeting sequence
  source 1..20: mol_type = other RNA
gggcctgtgatgggtggggc

SEQ ID NO: 17402 - RNA, 20 nt, synthetic construct
  misc_feature 1..20: note = C9Orf72 CTCN PAM targeting sequence
  source 1..20: mol_type = other RNA
gacatggcctggagacattt

SEQ ID NO: 17403 - RNA, 20 nt, synthetic construct
  misc_feature 1..20: note = C9Orf72 CTCN PAM targeting sequence
  source 1..20: mol_type = other RNA
aggccatgtcagagatcttc

SEQ ID NO: 17404 - RNA, 20 nt, synthetic construct
  misc_feature 1..20: note = C9Orf72 CTCN PAM targeting sequence
  source 1..20: mol_type = other RNA
ttgctccttatgcagccgac

SEQ ID NO: 17405 - RNA, 20 nt, synthetic construct
  misc_feature 1..20: note = C9Orf72 CTCN PAM targeting sequence
  source 1..20: mol_type = other RNA
ttatgcagccgacttgaatt

SEQ ID NO: 17406 - RNA, 20 nt, synthetic construct
  misc_feature 1..20: note = C9Orf72 CTCN PAM targeting sequence
  source 1..20: mol_type = other RNA
tcaaaaaatgggtttttctt

SEQ ID NO: 17407 - RNA, 20 nt, synthetic construct
  misc_feature 1..20: note = C9Orf72 CTCN PAM targeting sequence
  source 1..20: mol_type = other RNA
aaaaatgggtttttcttttc

SEQ ID NO: 17408 - RNA, 20 nt, synthetic construct
  misc_feature 1..20: note = C9Orf72 CTCN PAM targeting sequence
  source 1..20: mol_type = other RNA
ctcaagttcaaagttccaca

SEQ ID NO: 17409 - RNA, 20 nt, synthetic construct
  misc_feature 1..20: note = C9Orf72 CTCN PAM targeting sequence
  source 1..20: mol_type = other RNA
caagttcaaagttccacaaa

SEQ ID NO: 17410 - RNA, 20 nt, synthetic construct
  misc_feature 1..20: note = C9Orf72 CTCN PAM targeting sequence
  source 1..20: mol_type = other RNA
agttcaaagttccacaaatc

SEQ ID NO: 17411 - RNA, 20 nt, synthetic construct
  misc_feature 1..20: note = C9Orf72 CTCN PAM targeting sequence
  source 1..20: mol_type = other RNA
agggccaccagtctctttgc

SEQ ID NO: 17412 - RNA, 20 nt, synthetic construct
  misc_feature 1..20: note = C9Orf72 CTCN PAM targeting sequence
  source 1..20: mol_type = other RNA
ttgctaaaatataacaagag

SEQ ID NO: 17413 - RNA, 20 nt, synthetic construct
  misc_feature 1..20: note = C9Orf72 CTCN PAM targeting sequence
  source 1..20: mol_type = other RNA
tgttatattttagcaaagag

SEQ ID NO: 17414 - RNA, 20 nt, synthetic construct
  misc_feature 1..20: note = C9Orf72 CTCN PAM targeting sequence
  source 1..20: mol_type = other RNA
agttcccaacaagttcctca

SEQ ID NO: 17415 - RNA, 20 nt, synthetic construct
  misc_feature 1..20: note = C9Orf72 CTCN PAM targeting sequence
  source 1..20: mol_type = other RNA
tctccatctgagaccacttc

SEQ ID NO: 17416 - RNA, 20 nt, synthetic construct
  misc_feature 1..20: note = C9Orf72 CTCN PAM targeting sequence
  source 1..20: mol_type = other RNA
atctgagaccacttcagcct

SEQ ID NO: 17417 - RNA, 20 nt, synthetic construct
  misc_feature 1..20: note = C9Orf72 CTCN PAM targeting sequence
  source 1..20: mol_type = other RNA
gatggagatgaggaacttgt

SEQ ID NO: 17418 - RNA, 20 nt, synthetic construct
  misc_feature 1..20: note = C9Orf72 CTCN PAM targeting sequence
  source 1..20: mol_type = other RNA
taaagacttgttgaatggct

SEQ ID NO: 17419 - RNA, 20 nt, synthetic construct
  misc_feature 1..20: note = C9Orf72 CTCN PAM targeting sequence
  source 1..20: mol_type = other RNA
gcctgttacccagttccaaa

SEQ ID NO: 17420 - RNA, 20 nt, synthetic construct
  misc_feature 1..20: note = C9Orf72 CTCN PAM targeting sequence
  source 1..20: mol_type = other RNA
ctctactggtaccaatttac

SEQ ID NO: 17421 - RNA, 20 nt, synthetic construct
  misc_feature 1..20: note = C9Orf72 CTCN PAM targeting sequence
  source 1..20: mol_type = other RNA
actggtaccaatttactata

SEQ ID NO: 17422 - RNA, 20 nt, synthetic construct
  misc_feature 1..20: note = C9Orf72 CTCN PAM targeting sequence
  source 1..20: mol_type = other RNA
aagtccaattaaaccccttt

SEQ ID NO: 17423 - RNA, 20 nt, synthetic construct
  misc_feature 1..20: note = C9Orf72 CTCN PAM targeting sequence
  source 1..20: mol_type = other RNA
ccaaccatgtggaactctaa

SEQ ID NO: 17424 - RNA, 20 nt, synthetic construct
  misc_feature 1..20: note = C9Orf72 CTCN PAM targeting sequence
  source 1..20: mol_type = other RNA
gaatcatagtgggaggcaga

SEQ ID NO: 17425 - RNA, 20 nt, synthetic construct
  misc_feature 1..20: note = C9Orf72 CTCN PAM targeting sequence
  source 1..20: mol_type = other RNA
cactatgattctgaggcctc

SEQ ID NO: 17426 - RNA, 20 nt, synthetic construct
  misc_feature 1..20: note = C9Orf72 CTCN PAM targeting sequence
  source 1..20: mol_type = other RNA
tgctgctgccgtataagaag

SEQ ID NO: 17427 - RNA, 20 nt, synthetic construct
  misc_feature 1..20: note = C9Orf72 CTCN PAM targeting sequence
  source 1..20: mol_type = other RNA
ttttctcttgctgctgccgt

SEQ ID NO: 17428 - RNA, 20 nt, synthetic construct
  misc_feature 1..20: note = C9Orf72 CTCN PAM targeting sequence
  source 1..20: mol_type = other RNA
tgagacttattcactatcac

SEQ ID NO: 17429 - RNA, 20 nt, synthetic construct
  misc_feature 1..20: note = C9Orf72 CTCN PAM targeting sequence
  source 1..20: mol_type = other RNA
cgagatctgatgggtttatc

SEQ ID NO: 17430 - RNA, 20 nt, synthetic construct
  misc_feature 1..20: note = C9Orf72 CTCN PAM targeting sequence
  source 1..20: mol_type = other RNA
ccttgggtccgtcctacaat

SEQ ID NO: 17431 - RNA, 20 nt, synthetic construct
  misc_feature 1..20: note = C9Orf72 CTCN PAM targeting sequence
  source 1..20: mol_type = other RNA
caaaattcccacatattgta

SEQ ID NO: 17432 - RNA, 20 nt, synthetic construct
  misc_feature 1..20: note = C9Orf72 CTCN PAM targeting sequence
  source 1..20: mol_type = other RNA
acttgaattttatctcccaa

SEQ ID NO: 17433 - RNA, 20 nt, synthetic construct
  misc_feature 1..20: note = C9Orf72 CTCN PAM targeting sequence
  source 1..20: mol_type = other RNA
ggattctgataacaggaatg

SEQ ID NO: 17434 - RNA, 20 nt, synthetic construct
  misc_feature 1..20: note = C9Orf72 CTCN PAM targeting sequence
  source 1..20: mol_type = other RNA
caagagagaacagacaacca

SEQ ID NO: 17435 - RNA, 20 nt, synthetic construct
  misc_feature 1..20: note = C9Orf72 CTCN PAM targeting sequence
  source 1..20: mol_type = other RNA
agagagaacagacaaccatc

SEQ ID NO: 17436 - RNA, 20 nt, synthetic construct
  misc_feature 1..20: note = C9Orf72 CTCN PAM targeting sequence
  source 1..20: mol_type = other RNA
tgagagtttctagaaatgca

SEQ ID NO: 17437 - RNA, 20 nt, synthetic construct
  misc_feature 1..20: note = C9Orf72 CTCN PAM targeting sequence
  source 1..20: mol_type = other RNA
cttgagagtttctagaaatg

SEQ ID NO: 17438 - RNA, 20 nt, synthetic construct
  misc_feature 1..20: note = C9Orf72 CTCN PAM targeting sequence
  source 1..20: mol_type = other RNA
tttttctacatgaaaaacag

SEQ ID NO: 17439 - RNA, 20 nt, synthetic construct
  misc_feature 1..20: note = C9Orf72 CTCN PAM targeting sequence
  source 1..20: mol_type = other RNA
gggttacctgctttgtgtac

SEQ ID NO: 17440 - RNA, 20 nt, synthetic construct
  misc_feature 1..20: note = C9Orf72 CTCN PAM targeting sequence
  source 1..20: mol_type = other RNA
attttatctcagggttacct

SEQ ID NO: 17441 - RNA, 20 nt, synthetic construct
  misc_feature 1..20: note = C9Orf72 CTCN PAM targeting sequence
  source 1..20: mol_type = other RNA
attctctcaaacatgccaat

SEQ ID NO: 17442 - RNA, 20 nt, synthetic construct
  misc_feature 1..20: note = C9Orf72 CTCN PAM targeting sequence
  source 1..20: mol_type = other RNA
caaacatgccaataacaagt

SEQ ID NO: 17443 - RNA, 20 nt, synthetic construct
  misc_feature 1..20: note = C9Orf72 CTCN PAM targeting sequence
  source 1..20: mol_type = other RNA
aacatgccaataacaagtta

SEQ ID NO: 17444 - RNA, 20 nt, synthetic construct
  misc_feature 1..20: note = C9Orf72 CTCN PAM targeting sequence
  source 1..20: mol_type = other RNA
atttcatttcaaactttttt

SEQ ID NO: 17445 - RNA, 20 nt, synthetic construct
  misc_feature 1..20: note = C9Orf72 CTCN PAM targeting sequence
  source 1..20: mol_type = other RNA
tcaaagactgaaaagaggtc

SEQ ID NO: 17446 - RNA, 20 nt, synthetic construct
  misc_feature 1..20: note = C9Orf72 CTCN PAM targeting sequence
  source 1..20: mol_type = other RNA
aagactgaaaagaggtctac

SEQ ID NO: 17447 - RNA, 20 nt, synthetic construct
  misc_feature 1..20: note = C9Orf72 CTCN PAM targeting sequence
  source 1..20: mol_type = other RNA
tttcagtctttgaggaggat

SEQ ID NO: 17448 - RNA, 20 nt, synthetic construct
  misc_feature 1..20: note = C9Orf72 CTCN PAM targeting sequence
  source 1..20: mol_type = other RNA
aaaggtagacctcttttcag

SEQ ID NO: 17449 - RNA, 20 nt, synthetic construct
  misc_feature 1..20: note = C9Orf72 CTCN PAM targeting sequence
  source 1..20: mol_type = other RNA
gacctgcatctttctggctc

SEQ ID NO: 17450 - RNA, 20 nt, synthetic construct
  misc_feature 1..20: note = C9Orf72 CTCN PAM targeting sequence
  source 1..20: mol_type = other RNA
gccccttgaccagttaccct

SEQ ID NO: 17451 - RNA, 20 nt, synthetic construct
  misc_feature 1..20: note = C9Orf72 CTCN PAM targeting sequence
  source 1..20: mol_type = other RNA
ttgtgctttaatttctttct

SEQ ID NO: 17452 - RNA, 20 nt, synthetic construct
  misc_feature 1..20: note = C9Orf72 CTCN PAM targeting sequence
  source 1..20: mol_type = other RNA
cttatccccaaaacccactg

SEQ ID NO: 17453 - RNA, 20 nt, synthetic construct
  misc_feature 1..20: note = C9Orf72 CTCN PAM targeting sequence
  source 1..20: mol_type = other RNA
tatgatcagatttcaggtgg

SEQ ID NO: 17454 - RNA, 20 nt, synthetic construct
  misc_feature 1..20: note = C9Orf72 CTCN PAM targeting sequence
  source 1..20: mol_type = other RNA
tattgatcatcacaccacct

SEQ ID NO: 17455 - RNA, 20 nt, synthetic construct
  misc_feature 1..20: note = C9Orf72 CTCN PAM targeting sequence
  source 1..20: mol_type = other RNA
ttctttgacttcttccccac

SEQ ID NO: 17456 - RNA, 20 nt, synthetic construct
  misc_feature 1..20: note = C9Orf72 CTCN PAM targeting sequence
  source 1..20: mol_type = other RNA
aaaagtgtaaaatcttgagg

SEQ ID NO: 17457 - RNA, 20 nt, synthetic construct
  misc_feature 1..20: note = C9Orf72 CTCN PAM targeting sequence
  source 1..20: mol_type = other RNA
agattttacactttttgagg

SEQ ID NO: 17458 - RNA, 20 nt, synthetic construct
  misc_feature 1..20: note = C9Orf72 CTCN PAM targeting sequence
  source 1..20: mol_type = other RNA
gagggaagcaccatttcccc

SEQ ID NO: 17459 - RNA, 20 nt, synthetic construct
  misc_feature 1..20: note = C9Orf72 CTCN PAM targeting sequence
  source 1..20: mol_type = other RNA
gaggtgcctcaagattttac

SEQ ID NO: 17460 - RNA, 20 nt, synthetic construct
  misc_feature 1..20: note = C9Orf72 CTCN PAM targeting sequence
  source 1..20: mol_type = other RNA
tggtttggatgaggaagaat

SEQ ID NO: 17461 - RNA, 20 nt, synthetic construct
  misc_feature 1..20: note = C9Orf72 CTCN PAM targeting sequence
  source 1..20: mol_type = other RNA
tccaaaccacgagtggggaa

SEQ ID NO: 17462 - RNA, 20 nt, synthetic construct
  misc_feature 1..20: note = C9Orf72 CTCN PAM targeting sequence
  source 1..20: mol_type = other RNA
ctatgtccttttactaacat

SEQ ID NO: 17463 - RNA, 20 nt, synthetic construct
  misc_feature 1..20: note = C9Orf72 CTCN PAM targeting sequence
  source 1..20: mol_type = other RNA
atgtccttttactaacatcg

SEQ ID NO: 17464 - RNA, 20 nt, synthetic construct
  misc_feature 1..20: note = C9Orf72 CTCN PAM targeting sequence
  source 1..20: mol_type = other RNA
acttgccctggggcgatgtt

SEQ ID NO: 17465 - RNA, 20 nt, synthetic construct
  misc_feature 1..20: note = C9Orf72 CTCN PAM targeting sequence
  source 1..20: mol_type = other RNA
gctggctcagcctgaccttt

SEQ ID NO: 17466 - RNA, 20 nt, synthetic construct
  misc_feature 1..20: note = C9Orf72 CTCN PAM targeting sequence
  source 1..20: mol_type = other RNA
gcctgaccttttttcctcct

SEQ ID NO: 17467 - RNA, 20 nt, synthetic construct
  misc_feature 1..20: note = C9Orf72 CTCN PAM targeting sequence
  source 1..20: mol_type = other RNA
tgcgaagtgcctgctttcaa

SEQ ID NO: 17468 - RNA, 20 nt, synthetic construct
  misc_feature 1..20: note = C9Orf72 CTCN PAM targeting sequence
  source 1..20: mol_type = other RNA
caccagtgctacatgggaaa

SEQ ID NO: 17469 - RNA, 20 nt, synthetic construct
  misc_feature 1..20: note = C9Orf72 CTCN PAM targeting sequence
  source 1..20: mol_type = other RNA
ccagtgctacatgggaaagg

SEQ ID NO: 17470 - RNA, 20 nt, synthetic construct
  misc_feature 1..20: note = C9Orf72 CTCN PAM targeting sequence
  source 1..20: mol_type = other RNA
ggatttgcccaccctttccc

SEQ ID NO: 17471 - RNA, 20 nt, synthetic construct
  misc_feature 1..20: note = C9Orf72 CTCN PAM targeting sequence
  source 1..20: mol_type = other RNA
aaactctggatttgcccacc

SEQ ID NO: 17472 - RNA, 20 nt, synthetic construct
  misc_feature 1..20: note = C9Orf72 CTCN PAM targeting sequence
  source 1..20: mol_type = other RNA
tccctatgtggcttcaaaga

SEQ ID NO: 17473 - RNA, 20 nt, synthetic construct
  misc_feature 1..20: note = C9Orf72 CTCN PAM targeting sequence
  source 1..20: mol_type = other RNA
attggagaactaacattgtt

SEQ ID NO: 17474 - RNA, 20 nt, synthetic construct
  misc_feature 1..20: note = C9Orf72 CTCN PAM targeting sequence
  source 1..20: mol_type = other RNA
aatagagccctaataaacaa

SEQ ID NO: 17475 - RNA, 20 nt, synthetic construct
  misc_feature 1..20: note = C9Orf72 CTCN PAM targeting sequence
  source 1..20: mol_type = other RNA
gcacaacttaacaatgttag

SEQ ID NO: 17476 - RNA, 20 nt, synthetic construct
  misc_feature 1..20: note = C9Orf72 CTCN PAM targeting sequence
  source 1..20: mol_type = other RNA
gctaacaaaaacagctaact

SEQ ID NO: 17477 - RNA, 20 nt, synthetic construct
  misc_feature 1..20: note = C9Orf72 CTCN PAM targeting sequence
  source 1..20: mol_type = other RNA
tcgtgacattagttcaacaa

SEQ ID NO: 17478 - RNA, 20 nt, synthetic construct
  misc_feature 1..20: note = C9Orf72 CTCN PAM targeting sequence
  source 1..20: mol_type = other RNA
gtttaagacataacttactc

SEQ ID NO: 17479 - RNA, 20 nt, synthetic construct
  misc_feature 1..20: note = C9Orf72 CTCN PAM targeting sequence
  source 1..20: mol_type = other RNA
tctgcagaaagtctgtctac

SEQ ID NO: 17480 - RNA, 20 nt, synthetic construct
  misc_feature 1..20: note = C9Orf72 CTCN PAM targeting sequence
  source 1..20: mol_type = other RNA
agagatttctcagctaagaa

SEQ ID NO: 17481 - RNA, 20 nt, synthetic construct
  misc_feature 1..20: note = C9Orf72 CTCN PAM targeting sequence
  source 1..20: mol_type = other RNA
tgagaaggctatgcatttct

SEQ ID NO: 17482 - RNA, 20 nt, synthetic construct
  misc_feature 1..20: note = C9Orf72 CTCN PAM targeting sequence
  source 1..20: mol_type = other RNA
gctaagaaagaaaacctagt

SEQ ID NO: 17483 - RNA, 20 nt, synthetic construct
  misc_feature 1..20: note = C9Orf72 CTCN PAM targeting sequence
  source 1..20: mol_type = other RNA
gtggcagacacacagagaca

SEQ ID NO: 17484 - RNA, 20 nt, synthetic construct
  misc_feature 1..20: note = C9Orf72 CTCN PAM targeting sequence
  source 1..20: mol_type = other RNA
gtgtgtctgccactgagcag

SEQ ID NO: 17485 - RNA, 20 nt, synthetic construct
  misc_feature 1..20: note = C9Orf72 CTCN PAM targeting sequence
  source 1..20: mol_type = other RNA
gaacagagtcccccatcatc

SEQ ID NO: 17486 - RNA, 20 nt, synthetic construct
  misc_feature 1..20: note = C9Orf72 CTCN PAM targeting sequence
  source 1..20: mol_type = other RNA
gttctgagcagtctgtctct

SEQ ID NO: 17487 - RNA, 20 nt, synthetic construct
  misc_feature 1..20: note = C9Orf72 CTCN PAM targeting sequence
  source 1..20: mol_type = other RNA
acaattgacagtgagcttta

SEQ ID NO: 17488 - RNA, 20 nt, synthetic construct
  misc_feature 1..20: note = C9Orf72 CTCN PAM targeting sequence
  source 1..20: mol_type = other RNA
ctgtcaattgtggaggattc

SEQ ID NO: 17489 - RNA, 20 nt, synthetic construct
  misc_feature 1..20: note = C9Orf72 CTCN PAM targeting sequence
  source 1..20: mol_type = other RNA
agggaactgaaaaactttct

SEQ ID NO: 17490 - RNA, 20 nt, synthetic construct
  misc_feature 1..20: note = C9Orf72 CTCN PAM targeting sequence
  source 1..20: mol_type = other RNA
gataaggcctctcccttgcc

SEQ ID NO: 17491 - RNA, 20 nt, synthetic construct
  misc_feature 1..20: note = C9Orf72 CTCN PAM targeting sequence
  source 1..20: mol_type = other RNA
cccttgcccagcctcgattt

SEQ ID NO: 17492 - RNA, 20 nt, synthetic construct
  misc_feature 1..20: note = C9Orf72 CTCN PAM targeting sequence
  source 1..20: mol_type = other RNA
cttgcccagcctcgatttcc

SEQ ID NO: 17493 - RNA, 20 nt, synthetic construct
  misc_feature 1..20: note = C9Orf72 CTCN PAM targeting sequence
  source 1..20: mol_type = other RNA
atttcctcaaacttctctct

SEQ ID NO: 17494 - RNA, 20 nt, synthetic construct
  misc_feature 1..20: note = C9Orf72 CTCN PAM targeting sequence
  source 1..20: mol_type = other RNA
aacttctctctggcttaact

SEQ ID NO: 17495 - RNA, 20 nt, synthetic construct
  misc_feature 1..20: note = C9Orf72 CTCN PAM targeting sequence
  source 1..20: mol_type = other RNA
ctggcttaacttcaactcct

SEQ ID NO: 17496 - RNA, 20 nt, synthetic construct
  misc_feature 1..20: note = C9Orf72 CTCN PAM targeting sequence
  source 1..20: mol_type = other RNA
ggcttaacttcaactcctgg

SEQ ID NO: 17497 - RNA, 20 nt, synthetic construct
  misc_feature 1..20: note = C9Orf72 CTCN PAM targeting sequence
  source 1..20: mol_type = other RNA
tggtaaagcagagggaacaa

SEQ ID NO: 17498 - RNA, 20 nt, synthetic construct
  misc_feature 1..20: note = C9Orf72 CTCN PAM targeting sequence
  source 1..20: mol_type = other RNA
gctttaccaggagttgaagt

SEQ ID NO: 17499 - RNA, 20 nt, synthetic construct
  misc_feature 1..20: note = C9Orf72 CTCN PAM targeting sequence
  source 1..20: mol_type = other RNA
ttcttttggtaccttgttcc

SEQ ID NO: 17500 - RNA, 20 nt, synthetic construct
  misc_feature 1..20: note = C9Orf72 CTCN PAM targeting sequence
  source 1..20: mol_type = other RNA
gatgcgaatgccccaggacc

SEQ ID NO: 17501 - RNA, 20 nt, synthetic construct
  misc_feature 1..20: note = C9Orf72 CTCN PAM targeting sequence
  source 1..20: mol_type = other RNA
catgtctggcccctccatca

SEQ ID NO: 17502 - RNA, 20 nt, synthetic construct
  misc_feature 1..20: note = C9Orf72 CTCN PAM targeting sequence
  source 1..20: mol_type = other RNA
atcagtttatgagggttggg

SEQ ID NO: 17503 - RNA, 20 nt, synthetic construct
  misc_feature 1..20: note = C9Orf72 CTCN PAM targeting sequence
  source 1..20: mol_type = other RNA
taaactgatggaggggccag

SEQ ID NO: 17504 - RNA, 20 nt, synthetic construct
  misc_feature 1..20: note = C9Orf72 CTCN PAM targeting sequence
  source 1..20: mol_type = other RNA
caaccctcataaactgatgg

SEQ ID NO: 17505 - RNA, 20 nt, synthetic construct
  misc_feature 1..20: note = C9Orf72 CTCN PAM targeting sequence
  source 1..20: mol_type = other RNA
gtaactttttgtggttaaac

SEQ ID NO: 17506 - RNA, 20 nt, synthetic construct
  misc_feature 1..20: note = C9Orf72 CTCN PAM targeting sequence
  source 1..20: mol_type = other RNA
agttgagaggactaggcccc

SEQ ID NO: 17507 - RNA, 20 nt, synthetic construct
  misc_feature 1..20: note = C9Orf72 CTCN PAM targeting sequence
  source 1..20: mol_type = other RNA
actggagaaagaactgttta

SEQ ID NO: 17508 - RNA, 20 nt, synthetic construct
  misc_feature 1..20: note = C9Orf72 CTCN PAM targeting sequence
  source 1..20: mol_type = other RNA
caactggagaaagaactgtt

SEQ ID NO: 17509 - RNA, 20 nt, synthetic construct
  misc_feature 1..20: note = C9Orf72 CTCN PAM targeting sequence
  source 1..20: mol_type = other RNA
ttatgattatgggggcctag

SEQ ID NO: 17510 - RNA, 20 nt, synthetic construct
  misc_feature 1..20: note = C9Orf72 CTCN PAM targeting sequence
  source 1..20: mol_type = other RNA
catgttttcattttctagca

SEQ ID NO: 17511 - RNA, 20 nt, synthetic construct
  misc_feature 1..20: note = C9Orf72 CTCN PAM targeting sequence
  source 1..20: mol_type = other RNA
tttggaagcatgcccactgg

SEQ ID NO: 17512 - RNA, 20 nt, synthetic construct
  misc_feature 1..20: note = C9Orf72 CTCN PAM targeting sequence
  source 1..20: mol_type = other RNA
gaggaaaaaataatggggaa

SEQ ID NO: 17513 - RNA, 20 nt, synthetic construct
  misc_feature 1..20: note = C9Orf72 CTCN PAM targeting sequence
  source 1..20: mol_type = other RNA
gaggtatatttttaaaactt

SEQ ID NO: 17514 - RNA, 20 nt, synthetic construct
  misc_feature 1..20: note = C9Orf72 CTCN PAM targeting sequence
  source 1..20: mol_type = other RNA
tccccattattttttcctct

SEQ ID NO: 17515 - RNA, 20 nt, synthetic construct
  misc_feature 1..20: note = C9Orf72 CTCN PAM targeting sequence
  source 1..20: mol_type = other RNA
cttccccattattttttcct

SEQ ID NO: 17516 - RNA, 20 nt, synthetic construct
  misc_feature 1..20: note = C9Orf72 CTCN PAM targeting sequence
  source 1..20: mol_type = other RNA
acaaaaaaagaaaaattccc

SEQ ID NO: 17517 - RNA, 20 nt, synthetic construct
  misc_feature 1..20: note = C9Orf72 CTCN PAM targeting sequence
  source 1..20: mol_type = other RNA
agcagtcctcctgcctcagc

SEQ ID NO: 17518 - RNA, 20 nt, synthetic construct
  misc_feature 1..20: note = C9Orf72 CTCN PAM targeting sequence
  source 1..20: mol_type = other RNA
tgcctcagcctccctagatg

SEQ ID NO: 17519 - RNA, 20 nt, synthetic construct
  misc_feature 1..20: note = C9Orf72 CTCN PAM targeting sequence
  source 1..20: mol_type = other RNA
gcctccctagatgctgggat

SEQ ID NO: 17520 - RNA, 20 nt, synthetic construct
  misc_feature 1..20: note = C9Orf72 CTCN PAM targeting sequence
  source 1..20: mol_type = other RNA
ctagatgctgggattacagg

SEQ ID NO: 17521 - RNA, 20 nt, synthetic construct
  misc_feature 1..20: note = C9Orf72 CTCN PAM targeting sequence
  source 1..20: mol_type = other RNA
tccctgtaatcccagcatct

SEQ ID NO: 17522 - RNA, 20 nt, synthetic construct
  misc_feature 1..20: note = C9Orf72 CTCN PAM targeting sequence
  source 1..20: mol_type = other RNA
tattagaaaaaaaattccca

SEQ ID NO: 17523 - RNA, 20 nt, synthetic construct
  misc_feature 1..20: note = C9Orf72 CTCN PAM targeting sequence
  source 1..20: mol_type = other RNA
cctcctttagtgaaaactca

SEQ ID NO: 17524 - RNA, 20 nt, synthetic construct
  misc_feature 1..20: note = C9Orf72 CTCN PAM targeting sequence
  source 1..20: mol_type = other RNA
tttagtgaaaactcaacttc

SEQ ID NO: 17525 - RNA, 20 nt, synthetic construct
  misc_feature 1..20: note = C9Orf72 CTCN PAM targeting sequence
  source 1..20: mol_type = other RNA
acttctgtgactttggtgtc

SEQ ID NO: 17526 - RNA, 20 nt, synthetic construct
  misc_feature 1..20: note = C9Orf72 CTCN PAM targeting sequence
  source 1..20: mol_type = other RNA
gttgcatccactcttgttgc

SEQ ID NO: 17527 - RNA, 20 nt, synthetic construct
  misc_feature 1..20: note = C9Orf72 CTCN PAM targeting sequence
  source 1..20: mol_type = other RNA
tgttgcctttgtacccttca

SEQ ID NO: 17528 - RNA, 20 nt, synthetic construct
  misc_feature 1..20: note = C9Orf72 CTCN PAM targeting sequence
  source 1..20: mol_type = other RNA
ctcaatcatcccacacaaca

SEQ ID NO: 17529 - RNA, 20 nt, synthetic construct
  misc_feature 1..20: note = C9Orf72 CTCN PAM targeting sequence
  source 1..20: mol_type = other RNA
atcatcccacacaacaccac

SEQ ID NO: 17530 - RNA, 20 nt, synthetic construct
  misc_feature 1..20: note = C9Orf72 CTCN PAM targeting sequence
  source 1..20: mol_type = other RNA
aactttgatcctgctaccca

SEQ ID NO: 17531 - RNA, 20 nt, synthetic construct
  misc_feature 1..20: note = C9Orf72 CTCN PAM targeting sequence
  source 1..20: mol_type = other RNA
ctagcagatgcacacggaat

SEQ ID NO: 17532 - RNA, 20 nt, synthetic construct
  misc_feature 1..20: note = C9Orf72 CTCN PAM targeting sequence
  source 1..20: mol_type = other RNA
attgaattaactgatgttca

SEQ ID NO: 17533 - RNA, 20 nt, synthetic construct
  misc_feature 1..20: note = C9Orf72 CTCN PAM targeting sequence
  source 1..20: mol_type = other RNA
taatttattaaaaacaaaaa

SEQ ID NO: 17534 - RNA, 20 nt, synthetic construct
  misc_feature 1..20: note = C9Orf72 CTCN PAM targeting sequence
  source 1..20: mol_type = other RNA
acctcagtgcctgtgttctt

SEQ ID NO: 17535 - RNA, 20 nt, synthetic construct
  misc_feature 1..20: note = C9Orf72 CTCN PAM targeting sequence
  source 1..20: mol_type = other RNA
gtgcctgtgttctttccact

SEQ ID NO: 17536 - RNA, 20 nt, synthetic construct
  misc_feature 1..20: note = C9Orf72 CTCN PAM targeting sequence
  source 1..20: mol_type = other RNA
cttttcgtgccaggcgtggt

SEQ ID NO: 17537 - RNA, 20 nt, synthetic construct
  misc_feature 1..20: note = C9Orf72 CTCN PAM targeting sequence
  source 1..20: mol_type = other RNA
tgccttggcttcccaaagtg

SEQ ID NO: 17538 - RNA, 20 nt, synthetic construct
  misc_feature 1..20: note = C9Orf72 CTCN PAM targeting sequence
  source 1..20: mol_type = other RNA
aattcctggcttcaagcgat

SEQ ID NO: 17539 - RNA, 20 nt, synthetic construct
  misc_feature 1..20: note = C9Orf72 CTCN PAM targeting sequence
  source 1..20: mol_type = other RNA
cccagccatctctgcaaaac

SEQ ID NO: 17540 - RNA, 20 nt, synthetic construct
  misc_feature 1..20: note = C9Orf72 CTCN PAM targeting sequence
  source 1..20: mol_type = other RNA
gcaaaacaaaacaaaacaaa

SEQ ID NO: 17541 - RNA, 20 nt, synthetic construct
  misc_feature 1..20: note = C9Orf72 CTCN PAM targeting sequence
  source 1..20: mol_type = other RNA
cagatagctgggaccatagg

SEQ ID NO: 17542 - RNA, 20 nt, synthetic construct
  misc_feature 1..20: note = C9Orf72 CTCN PAM targeting sequence
  source 1..20: mol_type = other RNA
gcctcccagatagctgggac

SEQ ID NO: 17543 - RNA, 20 nt, synthetic construct
  misc_feature 1..20: note = C9Orf72 CTCN PAM targeting sequence
  source 1..20: mol_type = other RNA
tgcctcagcctcccagatag

SEQ ID NO: 17544 - RNA, 20 nt, synthetic construct
  misc_feature 1..20: note = C9Orf72 CTCN PAM targeting sequence
  source 1..20: mol_type = other RNA
tcctgcctcagcctcccaga

SEQ ID NO: 17545 - RNA, 20 nt, synthetic construct
  misc_feature 1..20: note = C9Orf72 CTCN PAM targeting sequence
  source 1..20: mol_type = other RNA
tgtgatcctcctcctgcctc

SEQ ID NO: 17546 - RNA, 20 nt, synthetic construct
  misc_feature 1..20: note = C9Orf72 CTCN PAM targeting sequence
  source 1..20: mol_type = other RNA
taggctcatgtgatcctcct

SEQ ID NO: 17547 - RNA, 20 nt, synthetic construct
  misc_feature 1..20: note = C9Orf72 CTCN PAM targeting sequence
  source 1..20: mol_type = other RNA
aactcctaggctcatgtgat

SEQ ID NO: 17548 - RNA, 20 nt, synthetic construct
  misc_feature 1..20: note = C9Orf72 CTCN PAM targeting sequence
  source 1..20: mol_type = other RNA
gtgcccatgctggaatgcag

SEQ ID NO: 17549 - RNA, 20 nt, synthetic construct
  misc_feature 1..20: note = C9Orf72 CTCN PAM targeting sequence
  source 1..20: mol_type = other RNA
ctctgtgcccatgctggaat

SEQ ID NO: 17550 - RNA, 20 nt, synthetic construct
  misc_feature 1..20: note = C9Orf72 CTCN PAM targeting sequence
  source 1..20: mol_type = other RNA
taaaagaaaaaaaaaaaaaa

SEQ ID NO: 17551 - RNA, 20 nt, synthetic construct
  misc_feature 1..20: note = C9Orf72 CTCN PAM targeting sequence
  source 1..20: mol_type = other RNA
atagatctaaaaagacagtt

SEQ ID NO: 17552 - RNA, 20 nt, synthetic construct
  misc_feature 1..20: note = C9Orf72 CTCN PAM targeting sequence
  source 1..20: mol_type = other RNA
ccatagatctaaaaagacag

SEQ ID NO: 17553 - RNA, 20 nt, synthetic construct
  misc_feature 1..20: note = C9Orf72 CTCN PAM targeting sequence
  source 1..20: mol_type = other RNA
tttgttcctccaaatgaagt

SEQ ID NO: 17554 - RNA, 20 nt, synthetic construct
  misc_feature 1..20: note = C9Orf72 CTCN PAM targeting sequence
  source 1..20: mol_type = other RNA
aaatgaagttttatgcaggc

SEQ ID NO: 17555 - RNA, 20 nt, synthetic construct
  misc_feature 1..20: note = C9Orf72 CTCN PAM targeting sequence
  source 1..20: mol_type = other RNA
attttataaaaataaataaa

SEQ ID NO: 17556 - RNA, 20 nt, synthetic construct
  misc_feature 1..20: note = C9Orf72 CTCN PAM targeting sequence
  source 1..20: mol_type = other RNA
tctgcagctgaagcagggtg

SEQ ID NO: 17557 - RNA, 20 nt, synthetic construct
  misc_feature 1..20: note = C9Orf72 CTCN PAM targeting sequence
  source 1..20: mol_type = other RNA
tctcaacagccactgaaaca

SEQ ID NO: 17558 - RNA, 20 nt, synthetic construct
  misc_feature 1..20: note = C9Orf72 CTCN PAM targeting sequence
  source 1..20: mol_type = other RNA
caacagccactgaaacacct

SEQ ID NO: 17559 - RNA, 20 nt, synthetic construct
  misc_feature 1..20: note = C9Orf72 CTCN PAM targeting sequence
  source 1..20: mol_type = other RNA
acagccactgaaacacctct

SEQ ID NO: 17560 - RNA, 20 nt, synthetic construct
  misc_feature 1..20: note = C9Orf72 CTCN PAM targeting sequence
  source 1..20: mol_type = other RNA
gagaactttcaggtttcgct

SEQ ID NO: 17561 - RNA, 20 nt, synthetic construct
  misc_feature 1..20: note = C9Orf72 CTCN PAM targeting sequence
  source 1..20: mol_type = other RNA
gaggtgtttcagtggctgtt

SEQ ID NO: 17562 - RNA, 20 nt, synthetic construct
  misc_feature 1..20: note = C9Orf72 CTCN PAM targeting sequence
  source 1..20: mol_type = other RNA
ccagacccctaatgctgact

SEQ ID NO: 17563 - RNA, 20 nt, synthetic construct
  misc_feature 1..20: note = C9Orf72 CTCN PAM targeting sequence
  source 1..20: mol_type = other RNA
agcctccaggcgacttctcc

SEQ ID NO: 17564 - RNA, 20 nt, synthetic construct
  misc_feature 1..20: note = C9Orf72 CTCN PAM targeting sequence
  source 1..20: mol_type = other RNA
aggcgacttctccctacagt

SEQ ID NO: 17565 - RNA, 20 nt, synthetic construct
  misc_feature 1..20: note = C9Orf72 CTCN PAM targeting sequence
  source 1..20: mol_type = other RNA
ctacagtgctgttaggaagt

SEQ ID NO: 17566 - RNA, 20 nt, synthetic construct
  misc_feature 1..20: note = C9Orf72 CTCN PAM targeting sequence
  source 1..20: mol_type = other RNA
tgtctctcctttgctccaaa

SEQ ID NO: 17567 - RNA, 20 nt, synthetic construct
  misc_feature 1..20: note = C9Orf72 CTCN PAM targeting sequence
  source 1..20: mol_type = other RNA
cctttgctccaaagctctga

SEQ ID NO: 17568 - RNA, 20 nt, synthetic construct
  misc_feature 1..20: note = C9Orf72 CTCN PAM targeting sequence
  source 1..20: mol_type = other RNA
tttgctccaaagctctgaat

SEQ ID NO: 17569 - RNA, 20 nt, synthetic construct
  misc_feature 1..20: note = C9Orf72 CTCN PAM targeting sequence
  source 1..20: mol_type = other RNA
aaagctctgaatctgtagcc

SEQ ID NO: 17570 - RNA, 20 nt, synthetic construct
  misc_feature 1..20: note = C9Orf72 CTCN PAM targeting sequence
  source 1..20: mol_type = other RNA
gaatctgtagcccttccttt

SEQ ID NO: 17571 - RNA, 20 nt, synthetic construct
  misc_feature 1..20: note = C9Orf72 CTCN PAM targeting sequence
  source 1..20: mol_type = other RNA
cagctcacccccaacttctg

SEQ ID NO: 17572 - RNA, 20 nt, synthetic construct
  misc_feature 1..20: note = C9Orf72 CTCN PAM targeting sequence
  source 1..20: mol_type = other RNA
cccccaacttctggcccatc

SEQ ID NO: 17573 - RNA, 20 nt, synthetic construct
  misc_feature 1..20: note = C9Orf72 CTCN PAM targeting sequence
  source 1..20: mol_type = other RNA
ggtggaggttcagcctaccc

SEQ ID NO: 17574 - RNA, 20 nt, synthetic construct
  misc_feature 1..20: note = C9Orf72 CTCN PAM targeting sequence
  source 1..20: mol_type = other RNA
accagaggtggcagcttgtg

SEQ ID NO: 17575 - RNA, 20 nt, synthetic construct
  misc_feature 1..20: note = C9Orf72 CTCN PAM targeting sequence
  source 1..20: mol_type = other RNA
cctgacccttccctaatctg

SEQ ID NO: 17576 - RNA, 20 nt, synthetic construct
  misc_feature 1..20: note = C9Orf72 CTCN PAM targeting sequence
  source 1..20: mol_type = other RNA
tgacccttccctaatctggc

SEQ ID NO: 17577 - RNA, 20 nt, synthetic construct
  misc_feature 1..20: note = C9Orf72 CTCN PAM targeting sequence
  source 1..20: mol_type = other RNA
tttggaacccttgcttttct

SEQ ID NO: 17578 - RNA, 20 nt, synthetic construct
  misc_feature 1..20: note = C9Orf72 CTCN PAM targeting sequence
  source 1..20: mol_type = other RNA
gcaaatatttatgggtttga

SEQ ID NO: 17579 - RNA, 20 nt, synthetic construct
  misc_feature 1..20: note = C9Orf72 CTCN PAM targeting sequence
  source 1..20: mol_type = other RNA
ataagaacaagtcaaaccca

SEQ ID NO: 17580 - RNA, 20 nt, synthetic construct
  misc_feature 1..20: note = C9Orf72 CTCN PAM targeting sequence
  source 1..20: mol_type = other RNA
tcccccagcactgcctcccc

SEQ ID NO: 17581 - RNA, 20 nt, synthetic construct
  misc_feature 1..20: note = C9Orf72 CTCN PAM targeting sequence
  source 1..20: mol_type = other RNA
ccctggccttttatcttttg

SEQ ID NO: 17582 - RNA, 20 nt, synthetic construct
  misc_feature 1..20: note = C9Orf72 CTCN PAM targeting sequence
  source 1..20: mol_type = other RNA
ttcacttttccccttttgag

SEQ ID NO: 17583 - RNA, 20 nt, synthetic construct
  misc_feature 1..20: note = C9Orf72 CTCN PAM targeting sequence
  source 1..20: mol_type = other RNA
aaaggggaaaagtgaaagag

SEQ ID NO: 17584 - RNA, 20 nt, synthetic construct
  misc_feature 1..20: note = C9Orf72 CTCN PAM targeting sequence
  source 1..20: mol_type = other RNA
ggcggctctggtagaaggtg

SEQ ID NO: 17585 - RNA, 20 nt, synthetic construct
  misc_feature 1..20: note = C9Orf72 CTCN PAM targeting sequence
  source 1..20: mol_type = other RNA
ggtagaaggtggtggctgct

SEQ ID NO: 17586 - RNA, 20 nt, synthetic construct
  misc_feature 1..20: note = C9Orf72 CTCN PAM targeting sequence
  source 1..20: mol_type = other RNA
ccctgaaccatctgtccacg

SEQ ID NO: 17587 - RNA, 20 nt, synthetic construct
  misc_feature 1..20: note = C9Orf72 CTCN PAM targeting sequence
  source 1..20: mol_type = other RNA
gggtttcctggggacactcg

SEQ ID NO: 17588 - RNA, 20 nt, synthetic construct
  misc_feature 1..20: note = C9Orf72 CTCN PAM targeting sequence
  source 1..20: mol_type = other RNA
gaaatggcagaaagaccaag

SEQ ID NO: 17589 - RNA, 20 nt, synthetic construct
  misc_feature 1..20: note = C9Orf72 CTCN PAM targeting sequence
  source 1..20: mol_type = other RNA
agcatcccacccctcaccag

SEQ ID NO: 17590 - RNA, 20 nt, synthetic construct
  misc_feature 1..20: note = C9Orf72 CTCN PAM targeting sequence
  source 1..20: mol_type = other RNA
ccagtggatgtgtggactct

SEQ ID NO: 17591 - RNA, 20 nt, synthetic construct
  misc_feature 1..20: note = C9Orf72 CTCN PAM targeting sequence
  source 1..20: mol_type = other RNA
gctgctctccaggatttaag

SEQ ID NO: 17592 - RNA, 20 nt, synthetic construct
  misc_feature 1..20: note = C9Orf72 CTCN PAM targeting sequence
  source 1..20: mol_type = other RNA
ccaggatttaagagctccct

SEQ ID NO: 17593 - RNA, 20 nt, synthetic construct
  misc_feature 1..20: note = C9Orf72 CTCN PAM targeting sequence
  source 1..20: mol_type = other RNA
aggatttaagagctccctga

SEQ ID NO: 17594 - RNA, 20 nt, synthetic construct
  misc_feature 1..20: note = C9Orf72 CTCN PAM targeting sequence
  source 1..20: mol_type = other RNA
taaatcctggagagcagcag

SEQ ID NO: 17595 - RNA, 20 nt, synthetic construct
  misc_feature 1..20: note = C9Orf72 CTCN PAM targeting sequence
  source 1..20: mol_type = other RNA
ctgagccagggagtctgaca

SEQ ID NO: 17596 - RNA, 20 nt, synthetic construct
  misc_feature 1..20: note = C9Orf72 CTCN PAM targeting sequence
  source 1..20: mol_type = other RNA
gggagctcttaaatcctgga

SEQ ID NO: 17597 - RNA, 20 nt, synthetic construct
  misc_feature 1..20: note = C9Orf72 CTCN PAM targeting sequence
  source 1..20: mol_type = other RNA
ctggctcagggagctcttaa

SEQ ID NO: 17598 - RNA, 20 nt, synthetic construct
  misc_feature 1..20: note = C9Orf72 CTCN PAM targeting sequence
  source 1..20: mol_type = other RNA
ggaaatgacttttggcccat

SEQ ID NO: 17599 - RNA, 20 nt, synthetic construct
  misc_feature 1..20: note = C9Orf72 CTCN PAM targeting sequence
  source 1..20: mol_type = other RNA
tgcctattcgcctcaggaaa

SEQ ID NO: 17600 - RNA, 20 nt, synthetic construct
  misc_feature 1..20: note = C9Orf72 CTCN PAM targeting sequence
  source 1..20: mol_type = other RNA
tcagatgaccacttttgtct

SEQ ID NO: 17601 - RNA, 20 nt, synthetic construct
  misc_feature 1..20: note = C9Orf72 CTCN PAM targeting sequence
  source 1..20: mol_type = other RNA
tttcccccaaggactttttc

SEQ ID NO: 17602 - RNA, 20 nt, synthetic construct
  misc_feature 1..20: note = C9Orf72 CTCN PAM targeting sequence
  source 1..20: mol_type = other RNA
acaggtggtgtagaccagta

SEQ ID NO: 17603 - RNA, 20 nt, synthetic construct
  misc_feature 1..20: note = C9Orf72 CTCN PAM targeting sequence
  source 1..20: mol_type = other RNA
ccacaggtggtgtagaccag

SEQ ID NO: 17604 - RNA, 20 nt, synthetic construct
  misc_feature 1..20: note = C9Orf72 CTCN PAM targeting sequence
  source 1..20: mol_type = other RNA
tggtcactgtgttgtataga

SEQ ID NO: 17605 - RNA, 20 nt, synthetic construct
  misc_feature 1..20: note = C9Orf72 CTCN PAM targeting sequence
  source 1..20: mol_type = other RNA
gatccatttacttaacgacc

SEQ ID NO: 17606 - RNA, 20 nt, synthetic construct
  misc_feature 1..20: note = C9Orf72 CTCN PAM targeting sequence
  source 1..20: mol_type = other RNA
caaatctaccatttctagag

SEQ ID NO: 17607 - RNA, 20 nt, synthetic construct
  misc_feature 1..20: note = C9Orf72 CTCN PAM targeting sequence
  source 1..20: mol_type = other RNA
agaaatggtagatttgggag

SEQ ID NO: 17608 - RNA, 20 nt, synthetic construct
  misc_feature 1..20: note = C9Orf72 CTCN PAM targeting sequence
  source 1..20: mol_type = other RNA
ggagcttactatatcacatt

SEQ ID NO: 17609 - RNA, 20 nt, synthetic construct
  misc_feature 1..20: note = C9Orf72 CTCN PAM targeting sequence
  source 1..20: mol_type = other RNA
agagcccacactctagaaat

SEQ ID NO: 17610 - RNA, 20 nt, synthetic construct
  misc_feature 1..20: note = C9Orf72 CTCN PAM targeting sequence
  source 1..20: mol_type = other RNA
acgttagcttcctcttcttc

SEQ ID NO: 17611 - RNA, 20 nt, synthetic construct
  misc_feature 1..20: note = C9Orf72 CTCN PAM targeting sequence
  source 1..20: mol_type = other RNA
tcttccatttctgtaaaatg

SEQ ID NO: 17612 - RNA, 20 nt, synthetic construct
  misc_feature 1..20: note = C9Orf72 CTCN PAM targeting sequence
  source 1..20: mol_type = other RNA
attttacagaaatggaagaa

SEQ ID NO: 17613 - RNA, 20 nt, synthetic construct
  misc_feature 1..20: note = C9Orf72 CTCN PAM targeting sequence
  source 1..20: mol_type = other RNA
aagggctgccatgagagtta

SEQ ID NO: 17614 - RNA, 20 nt, synthetic construct
  misc_feature 1..20: note = C9Orf72 CTCN PAM targeting sequence
  source 1..20: mol_type = other RNA
tggcagccctttgagatgga

SEQ ID NO: 17615 - RNA, 20 nt, synthetic construct
  misc_feature 1..20: note = C9Orf72 CTCN PAM targeting sequence
  source 1..20: mol_type = other RNA
catggcagccctttgagatg

SEQ ID NO: 17616 - RNA, 20 nt, synthetic construct
  misc_feature 1..20: note = C9Orf72 CTCN PAM targeting sequence
  source 1..20: mol_type = other RNA
tatacatatgtctccctcct

SEQ ID NO: 17617 - RNA, 20 nt, synthetic construct
  misc_feature 1..20: note = C9Orf72 CTCN PAM targeting sequence
  source 1..20: mol_type = other RNA
ctccttctggatagggaact

SEQ ID NO: 17618 - RNA, 20 nt, synthetic construct
  misc_feature 1..20: note = C9Orf72 CTCN PAM targeting sequence
  source 1..20: mol_type = other RNA
ttctggatagggaactcctg

SEQ ID NO: 17619 - RNA, 20 nt, synthetic construct
  misc_feature 1..20: note = C9Orf72 CTCN PAM targeting sequence
  source 1..20: mol_type = other RNA
tgaaaagcagatcccacagg

SEQ ID NO: 17620 - RNA, 20 nt, synthetic construct
  misc_feature 1..20: note = C9Orf72 CTCN PAM targeting sequence
  source 1..20: mol_type = other RNA
ctcctaaaacactcttagtg

SEQ ID NO: 17621 - RNA, 20 nt, synthetic construct
  misc_feature 1..20: note = C9Orf72 CTCN PAM targeting sequence
  source 1..20: mol_type = other RNA
cctaaaacactcttagtggg

SEQ ID NO: 17622 - RNA, 20 nt, synthetic construct
  misc_feature 1..20: note = C9Orf72 CTCN PAM targeting sequence
  source 1..20: mol_type = other RNA
taaaacactcttagtgggtt

SEQ ID NO: 17623 - RNA, 20 nt, synthetic construct
  misc_feature 1..20: note = C9Orf72 CTCN PAM targeting sequence
  source 1..20: mol_type = other RNA
tagtgggttataccttgcag

SEQ ID NO: 17624 - RNA, 20 nt, synthetic construct
  misc_feature 1..20: note = C9Orf72 CTCN PAM targeting sequence
  source 1..20: mol_type = other RNA
tcacctactgtcttagttga

SEQ ID NO: 17625 - RNA, 20 nt, synthetic construct
  misc_feature 1..20: note = C9Orf72 CTCN PAM targeting sequence
  source 1..20: mol_type = other RNA
cttcacctactgtcttagtt

SEQ ID NO: 17626 - RNA, 20 nt, synthetic construct
  misc_feature 1..20: note = C9Orf72 CTCN PAM targeting sequence
  source 1..20: mol_type = other RNA
ggatgattctttctggccta

SEQ ID NO: 17627 - RNA, 20 nt, synthetic construct
  misc_feature 1..20: note = C9Orf72 CTCN PAM targeting sequence
  source 1..20: mol_type = other RNA
ttgatttttggtttcttcta

SEQ ID NO: 17628 - RNA, 20 nt, synthetic construct
  misc_feature 1..20: note = C9Orf72 CTCN PAM targeting sequence
  source 1..20: mol_type = other RNA
tagtttctaatccaacttgc

SEQ ID NO: 17629 - RNA, 20 nt, synthetic construct
  misc_feature 1..20: note = C9Orf72 CTCN PAM targeting sequence
  source 1..20: mol_type = other RNA
tttgcaagataactatttcc

SEQ ID NO: 17630 - RNA, 20 nt, synthetic construct
  misc_feature 1..20: note = C9Orf72 CTCN PAM targeting sequence
  source 1..20: mol_type = other RNA
cctaaatgaatgaaaaaatt

SEQ ID NO: 17631 - RNA, 20 nt, synthetic construct
  misc_feature 1..20: note = C9Orf72 CTCN PAM targeting sequence
  source 1..20: mol_type = other RNA
aaaggcctcaggaacttttg

SEQ ID NO: 17632 - RNA, 20 nt, synthetic construct
  misc_feature 1..20: note = C9Orf72 CTCN PAM targeting sequence
  source 1..20: mol_type = other RNA
ggaacttttgcccagagaag

SEQ ID NO: 17633 - RNA, 20 nt, synthetic construct
  misc_feature 1..20: note = C9Orf72 CTCN PAM targeting sequence
  source 1..20: mol_type = other RNA
gggcaaaagttcctgaggcc

SEQ ID NO: 17634 - RNA, 20 nt, synthetic construct
  misc_feature 1..20: note = C9Orf72 CTCN PAM targeting sequence
  source 1..20: mol_type = other RNA
tcaagcaaagccatggaaaa

SEQ ID NO: 17635 - RNA, 20 nt, synthetic construct
  misc_feature 1..20: note = C9Orf72 CTCN PAM targeting sequence
  source 1..20: mol_type = other RNA
agcaaagccatggaaaacaa

SEQ ID NO: 17636 - RNA, 20 nt, synthetic construct
  misc_feature 1..20: note = C9Orf72 CTCN PAM targeting sequence
  source 1..20: mol_type = other RNA
gccctgcgcctgtggcagat

SEQ ID NO: 17637 - RNA, 20 nt, synthetic construct
  misc_feature 1..20: note = C9Orf72 CTCN PAM targeting sequence
  source 1..20: mol_type = other RNA
ccgcaggggtttggctcagc

SEQ ID NO: 17638 - RNA, 20 nt, synthetic construct
  misc_feature 1..20: note = C9Orf72 CTCN PAM targeting sequence
  source 1..20: mol_type = other RNA
ctttatttttggtccaagct

SEQ ID NO: 17639 - RNA, 20 nt, synthetic construct
  misc_feature 1..20: note = C9Orf72 CTCN PAM targeting sequence
  source 1..20: mol_type = other RNA
agtggatttcctctatttgg

SEQ ID NO: 17640 - RNA, 20 nt, synthetic construct
  misc_feature 1..20: note = C9Orf72 CTCN PAM targeting sequence
  source 1..20: mol_type = other RNA
atttggtctaagaaatctga

SEQ ID NO: 17641 - RNA, 20 nt, synthetic construct
  misc_feature 1..20: note = C9Orf72 CTCN PAM targeting sequence
  source 1..20: mol_type = other RNA
tcagatttcttagaccaaat

SEQ ID NO: 17642 - RNA, 20 nt, synthetic construct
  misc_feature 1..20: note = C9Orf72 CTCN PAM targeting sequence
  source 1..20: mol_type = other RNA
tgctgggctgatactatttt

SEQ ID NO: 17643 - RNA, 20 nt, synthetic construct
  misc_feature 1..20: note = C9Orf72 CTCN PAM targeting sequence
  source 1..20: mol_type = other RNA
cactctattctctttaaact

SEQ ID NO: 17644 - RNA, 20 nt, synthetic construct
  misc_feature 1..20: note = C9Orf72 CTCN PAM targeting sequence
  source 1..20: mol_type = other RNA
attctctttaaactgcactt

SEQ ID NO: 17645 - RNA, 20 nt, synthetic construct
  misc_feature 1..20: note = C9Orf72 CTCN PAM targeting sequence
  source 1..20: mol_type = other RNA
ttaaactgcactttattcta

SEQ ID NO: 17646 - RNA, 20 nt, synthetic construct
  misc_feature 1..20: note = C9Orf72 CTCN PAM targeting sequence
  source 1..20: mol_type = other RNA
tttttttttttttttttttt

SEQ ID NO: 17647 - RNA, 20 nt, synthetic construct
  misc_feature 1..20: note = C9Orf72 CTCN PAM targeting sequence
  source 1..20: mol_type = other RNA
ctgagtttaaacagtgtttg

SEQ ID NO: 17648 - RNA, 20 nt, synthetic construct
  misc_feature 1..20: note = C9Orf72 CTCN PAM targeting sequence
  source 1..20: mol_type = other RNA
gggagctctttttttttttt

SEQ ID NO: 17649 - RNA, 20 nt, synthetic construct
  misc_feature 1..20: note = C9Orf72 CTCN PAM targeting sequence
  source 1..20: mol_type = other RNA
accacctttttccaaaagga

SEQ ID NO: 17650 - RNA, 20 nt, synthetic construct
  misc_feature 1..20: note = C9Orf72 CTCN PAM targeting sequence
  source 1..20: mol_type = other RNA
gataatcatttcttctacca

SEQ ID NO: 17651 - RNA, 20 nt, synthetic construct
  misc_feature 1..20: note = C9Orf72 CTCN PAM targeting sequence
  source 1..20: mol_type = other RNA
gtatttttcagttttcacct

SEQ ID NO: 17652 - RNA, 20 nt, synthetic construct
  misc_feature 1..20: note = C9Orf72 CTCN PAM targeting sequence
  source 1..20: mol_type = other RNA
aatgcacgtctttacataac

SEQ ID NO: 17653 - RNA, 20 nt, synthetic construct
  misc_feature 1..20: note = C9Orf72 CTCN PAM targeting sequence
  source 1..20: mol_type = other RNA
gagattttaagtgattacac

SEQ ID NO: 17654 - RNA, 20 nt, synthetic construct
  misc_feature 1..20: note = C9Orf72 CTCN PAM targeting sequence
  source 1..20: mol_type = other RNA
gagttggaatagctatctgt

SEQ ID NO: 17655 - RNA, 20 nt, synthetic construct
  misc_feature 1..20: note = C9Orf72 CTCN PAM targeting sequence
  source 1..20: mol_type = other RNA
tttgctctcccttaattttc

SEQ ID NO: 17656 - RNA, 20 nt, synthetic construct
  misc_feature 1..20: note = C9Orf72 CTCN PAM targeting sequence
  source 1..20: mol_type = other RNA
cccttaattttccctaacct

SEQ ID NO: 17657 - RNA, 20 nt, synthetic construct
  misc_feature 1..20: note = C9Orf72 CTCN PAM targeting sequence
  source 1..20: mol_type = other RNA
cttaattttccctaaccttg

SEQ ID NO: 17658 - RNA, 20 nt, synthetic construct
  misc_feature 1..20: note = C9Orf72 CTCN PAM targeting sequence
  source 1..20: mol_type = other RNA
ttggccatactacccttgtc

SEQ ID NO: 17659 - RNA, 20 nt, synthetic construct
  misc_feature 1..20: note = C9Orf72 CTCN PAM targeting sequence
  source 1..20: mol_type = other RNA
tttctgcaaggaatgcaatc

SEQ ID NO: 17660 - RNA, 20 nt, synthetic construct
  misc_feature 1..20: note = C9Orf72 CTCN PAM targeting sequence
  source 1..20: mol_type = other RNA
ggattgcattccttgcagaa

SEQ ID NO: 17661 - RNA, 20 nt, synthetic construct
  misc_feature 1..20: note = C9Orf72 CTCN PAM targeting sequence
  source 1..20: mol_type = other RNA
ctggattgcattccttgcag

SEQ ID NO: 17662 - RNA, 20 nt, synthetic construct
  misc_feature 1..20: note = C9Orf72 CTCN PAM targeting sequence
  source 1..20: mol_type = other RNA
gctctctggattgcattcct

SEQ ID NO: 17663 - RNA, 20 nt, synthetic construct
  misc_feature 1..20: note = C9Orf72 CTCN PAM targeting sequence
  source 1..20: mol_type = other RNA
ctgtcctgaataaagtacac

SEQ ID NO: 17664 - RNA, 20 nt, synthetic construct
  misc_feature 1..20: note = C9Orf72 CTCN PAM targeting sequence
  source 1..20: mol_type = other RNA
tctagcggagtaatcttgtg

SEQ ID NO: 17665 - RNA, 20 nt, synthetic construct
  misc_feature 1..20: note = C9Orf72 CTCN PAM targeting sequence
  source 1..20: mol_type = other RNA
gctagatgagaaaaacgtgt

SEQ ID NO: 17666 - RNA, 20 nt, synthetic construct
  misc_feature 1..20: note = C9Orf72 CTCN PAM targeting sequence
  source 1..20: mol_type = other RNA
catttcacaagattactccg

SEQ ID NO: 17667 - RNA, 20 nt, synthetic construct
  misc_feature 1..20: note = C9Orf72 CTCN PAM targeting sequence
  source 1..20: mol_type = other RNA
gacactgggcagattgtact

SEQ ID NO: 17668 - RNA, 20 nt, synthetic construct
  misc_feature 1..20: note = C9Orf72 CTCN PAM targeting sequence
  source 1..20: mol_type = other RNA
ctcagacactgggcagattg

SEQ ID NO: 17669 - RNA, 20 nt, synthetic construct
  misc_feature 1..20: note = C9Orf72 CTCN PAM targeting sequence
  source 1..20: mol_type = other RNA
ccctttgcctccctcagaca

SEQ ID NO: 17670 - RNA, 20 nt, synthetic construct
  misc_feature 1..20: note = C9Orf72 CTCN PAM targeting sequence
  source 1..20: mol_type = other RNA
gtgtcccagcacgaccccac

SEQ ID NO: 17671 - RNA, 20 nt, synthetic construct
  misc_feature 1..20: note = C9Orf72 CTCN PAM targeting sequence
  source 1..20: mol_type = other RNA
tctgtgtcccagcacgaccc

SEQ ID NO: 17672 - RNA, 20 nt, synthetic construct
  misc_feature 1..20: note = C9Orf72 CTCN PAM targeting sequence
  source 1..20: mol_type = other RNA
ctgtttggagagccacgctc

SEQ ID NO: 17673 - RNA, 20 nt, synthetic construct
  misc_feature 1..20: note = C9Orf72 CTCN PAM targeting sequence
  source 1..20: mol_type = other RNA
aaacagggagtgactcctct

SEQ ID NO: 17674 - RNA, 20 nt, synthetic construct
  misc_feature 1..20: note = C9Orf72 CTCN PAM targeting sequence
  source 1..20: mol_type = other RNA
ccaaacagggagtgactcct

SEQ ID NO: 17675 - RNA, 20 nt, synthetic construct
  misc_feature 1..20: note = C9Orf72 CTCN PAM targeting sequence
  source 1..20: mol_type = other RNA
tagagcaccaggctcacagg

SEQ ID NO: 17676 - RNA, 20 nt, synthetic construct
  misc_feature 1..20: note = C9Orf72 CTCN PAM targeting sequence
  source 1..20: mol_type = other RNA
aggagcgtggctctccaaac

SEQ ID NO: 17677 - RNA, 20 nt, synthetic construct
  misc_feature 1..20: note = C9Orf72 CTCN PAM targeting sequence
  source 1..20: mol_type = other RNA
caggagggcacaggcaggag

SEQ ID NO: 17678 - RNA, 20 nt, synthetic construct
  misc_feature 1..20: note = C9Orf72 CTCN PAM targeting sequence
  source 1..20: mol_type = other RNA
tgtgagcctggtgctctagg

SEQ ID NO: 17679 - RNA, 20 nt, synthetic construct
  misc_feature 1..20: note = C9Orf72 CTCN PAM targeting sequence
  source 1..20: mol_type = other RNA
tgcctgtgccctcctgtgag

SEQ ID NO: 17680 - RNA, 20 nt, synthetic construct
  misc_feature 1..20: note = C9Orf72 CTCN PAM targeting sequence
  source 1..20: mol_type = other RNA
ttcctgggcaccgtgaaggc

SEQ ID NO: 17681 - RNA, 20 nt, synthetic construct
  misc_feature 1..20: note = C9Orf72 CTCN PAM targeting sequence
  source 1..20: mol_type = other RNA
gcttgtccagcttggacagc

SEQ ID NO: 17682 - RNA, 20 nt, synthetic construct
  misc_feature 1..20: note = C9Orf72 CTCN PAM targeting sequence
  source 1..20: mol_type = other RNA
ctgcttgtccagcttggaca

SEQ ID NO: 17683 - RNA, 20 nt, synthetic construct
  misc_feature 1..20: note = C9Orf72 CTCN PAM targeting sequence
  source 1..20: mol_type = other RNA
gggcaacaggtccctctctg

SEQ ID NO: 17684 - RNA, 20 nt, synthetic construct
  misc_feature 1..20: note = C9Orf72 CTCN PAM targeting sequence
  source 1..20: mol_type = other RNA
cagggcaacaggtccctctc

SEQ ID NO: 17685 - RNA, 20 nt, synthetic construct
  misc_feature 1..20: note = C9Orf72 CTCN PAM targeting sequence
  source 1..20: mol_type = other RNA
ttgatgtggattagtttagc

SEQ ID NO: 17686 - RNA, 20 nt, synthetic construct
  misc_feature 1..20: note = C9Orf72 CTCN PAM targeting sequence
  source 1..20: mol_type = other RNA
ggggcaacacagggacctga

SEQ ID NO: 17687 - RNA, 20 nt, synthetic construct
  misc_feature 1..20: note = C9Orf72 CTCN PAM targeting sequence
  source 1..20: mol_type = other RNA
aaccaagaggtcagccccaa

SEQ ID NO: 17688 - RNA, 20 nt, synthetic construct
  misc_feature 1..20: note = C9Orf72 CTCN PAM targeting sequence
  source 1..20: mol_type = other RNA
tggttggagaaggtgctaga

SEQ ID NO: 17689 - RNA, 20 nt, synthetic construct
  misc_feature 1..20: note = C9Orf72 CTCN PAM targeting sequence
  source 1..20: mol_type = other RNA
gcttcatcagaggtcatgca

SEQ ID NO: 17690 - RNA, 20 nt, synthetic construct
  misc_feature 1..20: note = C9Orf72 CTCN PAM targeting sequence
  source 1..20: mol_type = other RNA
gatgaagctgagggaatgtc

SEQ ID NO: 17691 - RNA, 20 nt, synthetic construct
  misc_feature 1..20: note = C9Orf72 CTCN PAM targeting sequence
  source 1..20: mol_type = other RNA
ccccagttccacacacaccc

SEQ ID NO: 17692 - RNA, 20 nt, synthetic construct
  misc_feature 1..20: note = C9Orf72 CTCN PAM targeting sequence
  source 1..20: mol_type = other RNA
ccagttccacacacacccca

SEQ ID NO: 17693 - RNA, 20 nt, synthetic construct
  misc_feature 1..20: note = C9Orf72 CTCN PAM targeting sequence
  source 1..20: mol_type = other RNA
caagcagaaggggaaagaag

SEQ ID NO: 17694 - RNA, 20 nt, synthetic construct
  misc_feature 1..20: note = C9Orf72 CTCN PAM targeting sequence
  source 1..20: mol_type = other RNA
aatgtgatggcattaaaagg

SEQ ID NO: 17695 - RNA, 20 nt, synthetic construct
  misc_feature 1..20: note = C9Orf72 CTCN PAM targeting sequence
  source 1..20: mol_type = other RNA
taaccaaactatcttccaaa

SEQ ID NO: 17696 - RNA, 20 nt, synthetic construct
  misc_feature 1..20: note = C9Orf72 CTCN PAM targeting sequence
  source 1..20: mol_type = other RNA
accctaatgaatgagattag

SEQ ID NO: 17697 - RNA, 20 nt, synthetic construct
  misc_feature 1..20: note = C9Orf72 CTCN PAM targeting sequence
  source 1..20: mol_type = other RNA
ttcattagggtagagccctc

SEQ ID NO: 17698 - RNA, 20 nt, synthetic construct
  misc_feature 1..20: note = C9Orf72 CTCN PAM targeting sequence
  source 1..20: mol_type = other RNA
agagggcccacaccagaacc

SEQ ID NO: 17699 - RNA, 20 nt, synthetic construct
  misc_feature 1..20: note = C9Orf72 CTCN PAM targeting sequence
  source 1..20: mol_type = other RNA
tgagggtagaaagctttctg

SEQ ID NO: 17700 - RNA, 20 nt, synthetic construct
  misc_feature 1..20: note = C9Orf72 CTCN PAM targeting sequence
  source 1..20: mol_type = other RNA
tagttctggaagctggaaat

SEQ ID NO: 17701 - RNA, 20 nt, synthetic construct
  misc_feature 1..20: note = C9Orf72 CTCN PAM targeting sequence
  source 1..20: mol_type = other RNA
tttttattatagtctaggtt

SEQ ID NO: 17702 - RNA, 20 nt, synthetic construct
  misc_feature 1..20: note = C9Orf72 CTCN PAM targeting sequence
  source 1..20: mol_type = other RNA
ttcccatacaaggctttata

SEQ ID NO: 17703 - RNA, 20 nt, synthetic construct
  misc_feature 1..20: note = C9Orf72 CTCN PAM targeting sequence
  source 1..20: mol_type = other RNA
aaccatatctagtaaacaca

SEQ ID NO: 17704 - RNA, 20 nt, synthetic construct
  misc_feature 1..20: note = C9Orf72 CTCN PAM targeting sequence
  source 1..20: mol_type = other RNA
ttactgtatgacctcccaga

SEQ ID NO: 17705 - RNA, 20 nt, synthetic construct
  misc_feature 1..20: note = C9Orf72 CTCN PAM targeting sequence
  source 1..20: mol_type = other RNA
cagaagctcatgagttctga

SEQ ID NO: 17706 - RNA, 20 nt, synthetic construct
  misc_feature 1..20: note = C9Orf72 CTCN PAM targeting sequence
  source 1..20: mol_type = other RNA
tgagttctgaggatttagaa

SEQ ID NO: 17707 - RNA, 20 nt, synthetic construct
  misc_feature 1..20: note = C9Orf72 CTCN PAM targeting sequence
  source 1..20: mol_type = other RNA
tgagcttctgggaggtcata

SEQ ID NO: 17708 - RNA, 20 nt, synthetic construct
  misc_feature 1..20: note = C9Orf72 CTCN PAM targeting sequence
  source 1..20: mol_type = other RNA
gaactcatgagcttctggga

SEQ ID NO: 17709 - RNA, 20 nt, synthetic construct
  misc_feature 1..20: note = C9Orf72 CTCN PAM targeting sequence
  source 1..20: mol_type = other RNA
ttataccagagattactttt

SEQ ID NO: 17710 - RNA, 20 nt, synthetic construct
  misc_feature 1..20: note = C9Orf72 CTCN PAM targeting sequence
  source 1..20: mol_type = other RNA
ggtataaggagtcagtttgg

SEQ ID NO: 17711 - RNA, 20 nt, synthetic construct
  misc_feature 1..20: note = C9Orf72 CTCN PAM targeting sequence
  source 1..20: mol_type = other RNA
catcaaggctggctgaataa

SEQ ID NO: 17712 - RNA, 20 nt, synthetic construct
  misc_feature 1..20: note = C9Orf72 CTCN PAM targeting sequence
  source 1..20: mol_type = other RNA
tcaaggctggctgaataaac

SEQ ID NO: 17713 - RNA, 20 nt, synthetic construct
  misc_feature 1..20: note = C9Orf72 CTCN PAM targeting sequence
  source 1..20: mol_type = other RNA
aaaacttccagaacaggaag

SEQ ID NO: 17714 - RNA, 20 nt, synthetic construct
  misc_feature 1..20: note = C9Orf72 CTCN PAM targeting sequence
  source 1..20: mol_type = other RNA
cccctccaaaacttccagaa

SEQ ID NO: 17715 - RNA, 20 nt, synthetic construct
  misc_feature 1..20: note = C9Orf72 CTCN PAM targeting sequence
  source 1..20: mol_type = other RNA
tcccttcttgcccttctttt

SEQ ID NO: 17716 - RNA, 20 nt, synthetic construct
  misc_feature 1..20: note = C9Orf72 CTCN PAM targeting sequence
  source 1..20: mol_type = other RNA
ttgaggagctatagcctctc

SEQ ID NO: 17717 - RNA, 20 nt, synthetic construct
  misc_feature 1..20: note = C9Orf72 CTCN PAM targeting sequence
  source 1..20: mol_type = other RNA
aagagcctttccagattttg

SEQ ID NO: 17718 - RNA, 20 nt, synthetic construct
  misc_feature 1..20: note = C9Orf72 CTCN PAM targeting sequence
  source 1..20: mol_type = other RNA
tcaaagagcctttccagatt

SEQ ID NO: 17719 - RNA, 20 nt, synthetic construct
  misc_feature 1..20: note = C9Orf72 CTCN PAM targeting sequence
  source 1..20: mol_type = other RNA
ccttctcaggcagtagcaaa

SEQ ID NO: 17720 - RNA, 20 nt, synthetic construct
  misc_feature 1..20: note = C9Orf72 CTCN PAM targeting sequence
  source 1..20: mol_type = other RNA
ttctcaggcagtagcaaata

SEQ ID NO: 17721 - RNA, 20 nt, synthetic construct
  misc_feature 1..20: note = C9Orf72 CTCN PAM targeting sequence
  source 1..20: mol_type = other RNA
ggcagtagcaaatagtctca

SEQ ID NO: 17722 - RNA, 20 nt, synthetic construct
  misc_feature 1..20: note = C9Orf72 CTCN PAM targeting sequence
  source 1..20: mol_type = other RNA
tcaaaacaaactttgaaatc

SEQ ID NO: 17723 - RNA, 20 nt, synthetic construct
  misc_feature 1..20: note = C9Orf72 CTCN PAM targeting sequence
  source 1..20: mol_type = other RNA
gcaaacccacctttaacaat

SEQ ID NO: 17724 - RNA, 20 nt, synthetic construct
  misc_feature 1..20: note = C9Orf72 CTCN PAM targeting sequence
  source 1..20: mol_type = other RNA
tagtgatctctgtctcctgg

SEQ ID NO: 17725 - RNA, 20 nt, synthetic construct
  misc_feature 1..20: note = C9Orf72 CTCN PAM targeting sequence
  source 1..20: mol_type = other RNA
gtctcctggcatccatgctt

SEQ ID NO: 17726 - RNA, 20 nt, synthetic construct
  misc_feature 1..20: note = C9Orf72 CTCN PAM targeting sequence
  source 1..20: mol_type = other RNA
tggcatccatgcttttgtat

SEQ ID NO: 17727 - RNA, 20 nt, synthetic construct
  misc_feature 1..20: note = C9Orf72 CTCN PAM targeting sequence
  source 1..20: mol_type = other RNA
gattgagtgaaggctggacc

SEQ ID NO: 17728 - RNA, 20 nt, synthetic construct
  misc_feature 1..20: note = C9Orf72 CTCN PAM targeting sequence
  source 1..20: mol_type = other RNA
atcagagcattatacaaaag

SEQ ID NO: 17729 - RNA, 20 nt, synthetic construct
  misc_feature 1..20: note = C9Orf72 CTCN PAM targeting sequence
  source 1..20: mol_type = other RNA
gggtccagccttcactcaat

SEQ ID NO: 17730 - RNA, 20 nt, synthetic construct
  misc_feature 1..20: note = C9Orf72 CTCN PAM targeting sequence
  source 1..20: mol_type = other RNA
tctgagattagcttataaaa

SEQ ID NO: 17731 - RNA, 20 nt, synthetic construct
  misc_feature 1..20: note = C9Orf72 CTCN PAM targeting sequence
  source 1..20: mol_type = other RNA
gaagagtgccccatcccttt

SEQ ID NO: 17732 - RNA, 20 nt, synthetic construct
  misc_feature 1..20: note = C9Orf72 CTCN PAM targeting sequence
  source 1..20: mol_type = other RNA
cttgctcacacactcttgct

SEQ ID NO: 17733 - RNA, 20 nt, synthetic construct
  misc_feature 1..20: note = C9Orf72 CTCN PAM targeting sequence
  source 1..20: mol_type = other RNA
tgctcacacactcttgctct

SEQ ID NO: 17734 - RNA, 20 nt, synthetic construct
  misc_feature 1..20: note = C9Orf72 CTCN PAM targeting sequence
  source 1..20: mol_type = other RNA
cacactcttgctctcgcttt

SEQ ID NO: 17735 - RNA, 20 nt, synthetic construct
  misc_feature 1..20: note = C9Orf72 CTCN PAM targeting sequence
  source 1..20: mol_type = other RNA
tgctctcgctttgatgatgc

SEQ ID NO: 17736 - RNA, 20 nt, synthetic construct
  misc_feature 1..20: note = C9Orf72 CTCN PAM targeting sequence
  source 1..20: mol_type = other RNA
cgctttgatgatgccagctg

SEQ ID NO: 17737 - RNA, 20 nt, synthetic construct
  misc_feature 1..20: note = C9Orf72 CTCN PAM targeting sequence
  source 1..20: mol_type = other RNA
ctttgatgatgccagctgcc

SEQ ID NO: 17738 - RNA, 20 nt, synthetic construct
  misc_feature 1..20: note = C9Orf72 CTCN PAM targeting sequence
  source 1..20: mol_type = other RNA
caacatggcagctggcatca

SEQ ID NO: 17739 - RNA, 20 nt, synthetic construct
  misc_feature 1..20: note = C9Orf72 CTCN PAM targeting sequence
  source 1..20: mol_type = other RNA
cctcctgagaggcccacata

SEQ ID NO: 17740 - RNA, 20 nt, synthetic construct
  misc_feature 1..20: note = C9Orf72 CTCN PAM targeting sequence
  source 1..20: mol_type = other RNA
tcctgagaggcccacatagc

SEQ ID NO: 17741 - RNA, 20 nt, synthetic construct
  misc_feature 1..20: note = C9Orf72 CTCN PAM targeting sequence
  source 1..20: mol_type = other RNA
tgagaggcccacatagcaag

SEQ ID NO: 17742 - RNA, 20 nt, synthetic construct
  misc_feature 1..20: note = C9Orf72 CTCN PAM targeting sequence
  source 1..20: mol_type = other RNA
ggaggagagctcacaacatg

SEQ ID NO: 17743 - RNA, 20 nt, synthetic construct
  misc_feature 1..20: note = C9Orf72 CTCN PAM targeting sequence
  source 1..20: mol_type = other RNA
caggaggagagctcacaaca

SEQ ID NO: 17744 - RNA, 20 nt, synthetic construct
  misc_feature 1..20: note = C9Orf72 CTCN PAM targeting sequence
  source 1..20: mol_type = other RNA
ctggctggcttttagctgga

SEQ ID NO: 17745 - RNA, 20 nt, synthetic construct
  misc_feature 1..20: note = C9Orf72 CTCN PAM targeting sequence
  source 1..20: mol_type = other RNA
tcactggctggcttttagct

SEQ ID NO: 17746 - RNA, 20 nt, synthetic construct
  misc_feature 1..20: note = C9Orf72 CTCN PAM targeting sequence
  source 1..20: mol_type = other RNA
ggccaacagttcaccaggat

SEQ ID NO: 17747 - RNA, 20 nt, synthetic construct
  misc_feature 1..20: note = C9Orf72 CTCN PAM targeting sequence
  source 1..20: mol_type = other RNA
gtggtcattggcaggattca

SEQ ID NO: 17748 - RNA, 20 nt, synthetic construct
  misc_feature 1..20: note = C9Orf72 CTCN PAM targeting sequence
  source 1..20: mol_type = other RNA
gaggcggctccttcccagtc

SEQ ID NO: 17749 - RNA, 20 nt, synthetic construct
  misc_feature 1..20: note = C9Orf72 CTCN PAM targeting sequence
  source 1..20: mol_type = other RNA
gagcttactcagtggtcatt

SEQ ID NO: 17750 - RNA, 20 nt, synthetic construct
  misc_feature 1..20: note = C9Orf72 CTCN PAM targeting sequence
  source 1..20: mol_type = other RNA
ttcccagtcaaaccttgata

SEQ ID NO: 17751 - RNA, 20 nt, synthetic construct
  misc_feature 1..20: note = C9Orf72 CTCN PAM targeting sequence
  source 1..20: mol_type = other RNA
gccttgggagagatcctgaa

SEQ ID NO: 17752 - RNA, 20 nt, synthetic construct
  misc_feature 1..20: note = C9Orf72 CTCN PAM targeting sequence
  source 1..20: mol_type = other RNA
caaggctgaggctgcagctg

SEQ ID NO: 17753 - RNA, 20 nt, synthetic construct
  misc_feature 1..20: note = C9Orf72 CTCN PAM targeting sequence
  source 1..20: mol_type = other RNA
cccaaggctgaggctgcagc

SEQ ID NO: 17754 - RNA, 20 nt, synthetic construct
  misc_feature 1..20: note = C9Orf72 CTCN PAM targeting sequence
  source 1..20: mol_type = other RNA
ggttcaggatctctcccaag

SEQ ID NO: 17755 - RNA, 20 nt, synthetic construct
  misc_feature 1..20: note = C9Orf72 CTCN PAM targeting sequence
  source 1..20: mol_type = other RNA
gcctgctgacccaaaaaaac

SEQ ID NO: 17756 - RNA, 20 nt, synthetic construct
  misc_feature 1..20: note = C9Orf72 CTCN PAM targeting sequence
  source 1..20: mol_type = other RNA
cagtttttttgggtcagcag

SEQ ID NO: 17757 - RNA, 20 nt, synthetic construct
  misc_feature 1..20: note = C9Orf72 CTCN PAM targeting sequence
  source 1..20: mol_type = other RNA
aatgcagtggtttaaaaaca

SEQ ID NO: 17758 - RNA, 20 nt, synthetic construct
  misc_feature 1..20: note = C9Orf72 CTCN PAM targeting sequence
  source 1..20: mol_type = other RNA
ttgtttataatcacatacaa

SEQ ID NO: 17759 - RNA, 20 nt, synthetic construct
  misc_feature 1..20: note = C9Orf72 CTCN PAM targeting sequence
  source 1..20: mol_type = other RNA
aaacacagggaggtcaatat

SEQ ID NO: 17760 - RNA, 20 nt, synthetic construct
  misc_feature 1..20: note = C9Orf72 CTCN PAM targeting sequence
  source 1..20: mol_type = other RNA
ctgtgttttgagggctgccc

SEQ ID NO: 17761 - RNA, 20 nt, synthetic construct
  misc_feature 1..20: note = C9Orf72 CTCN PAM targeting sequence
  source 1..20: mol_type = other RNA
agataagctcctcacccagt

SEQ ID NO: 17762 - RNA, 20 nt, synthetic construct
  misc_feature 1..20: note = C9Orf72 CTCN PAM targeting sequence
  source 1..20: mol_type = other RNA
tcacccagtgttctcatttc

SEQ ID NO: 17763 - RNA, 20 nt, synthetic construct
  misc_feature 1..20: note = C9Orf72 CTCN PAM targeting sequence
  source 1..20: mol_type = other RNA
cccagtgttctcatttcaga

SEQ ID NO: 17764 - RNA, 20 nt, synthetic construct
  misc_feature 1..20: note = C9Orf72 CTCN PAM targeting sequence
  source 1..20: mol_type = other RNA
tttcagaaaacaattctagt

SEQ ID NO: 17765 - RNA, 20 nt, synthetic construct
  misc_feature 1..20: note = C9Orf72 CTCN PAM targeting sequence
  source 1..20: mol_type = other RNA
gtctaatcaatttgaaagta

SEQ ID NO: 17766 - RNA, 20 nt, synthetic construct
  misc_feature 1..20: note = C9Orf72 CTCN PAM targeting sequence
  source 1..20: mol_type = other RNA
tcacaccctccaccacaact

SEQ ID NO: 17767 - RNA, 20 nt, synthetic construct
  misc_feature 1..20: note = C9Orf72 CTCN PAM targeting sequence
  source 1..20: mol_type = other RNA
caccctccaccacaactact

SEQ ID NO: 17768 - RNA, 20 nt, synthetic construct
  misc_feature 1..20: note = C9Orf72 CTCN PAM targeting sequence
  source 1..20: mol_type = other RNA
accacaactactcttgtcca

SEQ ID NO: 17769 - RNA, 20 nt, synthetic construct
  misc_feature 1..20: note = C9Orf72 CTCN PAM targeting sequence
  source 1..20: mol_type = other RNA
tgtccacaccaccagattct

SEQ ID NO: 17770 - RNA, 20 nt, synthetic construct
  misc_feature 1..20: note = C9Orf72 CTCN PAM targeting sequence
  source 1..20: mol_type = other RNA
ctctttacagctgccattga

SEQ ID NO: 17771 - RNA, 20 nt, synthetic construct
  misc_feature 1..20: note = C9Orf72 CTCN PAM targeting sequence
  source 1..20: mol_type = other RNA
ctttacagctgccattgact

SEQ ID NO: 17772 - RNA, 20 nt, synthetic construct
  misc_feature 1..20: note = C9Orf72 CTCN PAM targeting sequence
  source 1..20: mol_type = other RNA
ttacagctgccattgactgg

SEQ ID NO: 17773 - RNA, 20 nt, synthetic construct
  misc_feature 1..20: note = C9Orf72 CTCN PAM targeting sequence
  source 1..20: mol_type = other RNA
acttctgctcctcggcaaac

SEQ ID NO: 17774 - RNA, 20 nt, synthetic construct
  misc_feature 1..20: note = C9Orf72 CTCN PAM targeting sequence
  source 1..20: mol_type = other RNA
tcggcaaactattatttcca

SEQ ID NO: 17775 - RNA, 20 nt, synthetic construct
  misc_feature 1..20: note = C9Orf72 CTCN PAM targeting sequence
  source 1..20: mol_type = other RNA
gcaaactattatttccagac

SEQ ID NO: 17776 - RNA, 20 nt, synthetic construct
  misc_feature 1..20: note = C9Orf72 CTCN PAM targeting sequence
  source 1..20: mol_type = other RNA
tgtctggaaataatagtttg

SEQ ID NO: 17777 - RNA, 20 nt, synthetic construct
  misc_feature 1..20: note = C9Orf72 CTCN PAM targeting sequence
  source 1..20: mol_type = other RNA
ggctcctgtctggaaataat

SEQ ID NO: 17778 - RNA, 20 nt, synthetic construct
  misc_feature 1..20: note = C9Orf72 CTCN PAM targeting sequence
  source 1..20: mol_type = other RNA
tcaagccctacaatggcttc

SEQ ID NO: 17779 - RNA, 20 nt, synthetic construct
  misc_feature 1..20: note = C9Orf72 CTCN PAM targeting sequence
  source 1..20: mol_type = other RNA
gaataaaaacaaatgttgct

SEQ ID NO: 17780 - RNA, 20 nt, synthetic construct
  misc_feature 1..20: note = C9Orf72 CTCN PAM targeting sequence
  source 1..20: mol_type = other RNA
ccttcccctacgattctctc

SEQ ID NO: 17781 - RNA, 20 nt, synthetic construct
  misc_feature 1..20: note = C9Orf72 CTCN PAM targeting sequence
  source 1..20: mol_type = other RNA
ttcccctacgattctctccc

SEQ ID NO: 17782 - RNA, 20 nt, synthetic construct
  misc_feature 1..20: note = C9Orf72 CTCN PAM targeting sequence
  source 1..20: mol_type = other RNA
cccttacttatctgctctat

SEQ ID NO: 17783 - RNA, 20 nt, synthetic construct
  misc_feature 1..20: note = C9Orf72 CTCN PAM targeting sequence
  source 1..20: mol_type = other RNA
cttacttatctgctctatcc

SEQ ID NO: 17784 - RNA, 20 nt, synthetic construct
  misc_feature 1..20: note = C9Orf72 CTCN PAM targeting sequence
  source 1..20: mol_type = other RNA
atccacagtggcctccctga

SEQ ID NO: 17785 - RNA, 20 nt, synthetic construct
  misc_feature 1..20: note = C9Orf72 CTCN PAM targeting sequence
  source 1..20: mol_type = other RNA
ctgatgtttctacaacatgc

SEQ ID NO: 17786 - RNA, 20 nt, synthetic construct
  misc_feature 1..20: note = C9Orf72 CTCN PAM targeting sequence
  source 1..20: mol_type = other RNA
aaactaggtggcttaaagaa

SEQ ID NO: 17787 - RNA, 20 nt, synthetic construct
  misc_feature 1..20: note = C9Orf72 CTCN PAM targeting sequence
  source 1..20: mol_type = other RNA
gttttggagacaagaaatct

SEQ ID NO: 17788 - RNA, 20 nt, synthetic construct
  misc_feature 1..20: note = C9Orf72 CTCN PAM targeting sequence
  source 1..20: mol_type = other RNA
aaaactgagacagtacattt

SEQ ID NO: 17789 - RNA, 20 nt, synthetic construct
  misc_feature 1..20: note = C9Orf72 CTCN PAM targeting sequence
  source 1..20: mol_type = other RNA
gaaggcactagggagaaatc

SEQ ID NO: 17790 - RNA, 20 nt, synthetic construct
  misc_feature 1..20: note = C9Orf72 CTCN PAM targeting sequence
  source 1..20: mol_type = other RNA
ctagtgccttcagagaaagc

SEQ ID NO: 17791 - RNA, 20 nt, synthetic construct
  misc_feature 1..20: note = C9Orf72 CTCN PAM targeting sequence
  source 1..20: mol_type = other RNA
gcacctcaatctctaccttc

SEQ ID NO: 17792 - RNA, 20 nt, synthetic construct
  misc_feature 1..20: note = C9Orf72 CTCN PAM targeting sequence
  source 1..20: mol_type = other RNA
atctctaccttcatcttcac

SEQ ID NO: 17793 - RNA, 20 nt, synthetic construct
  misc_feature 1..20: note = C9Orf72 CTCN PAM targeting sequence
  source 1..20: mol_type = other RNA
accttcatcttcacaagtta

SEQ ID NO: 17794 - RNA, 20 nt, synthetic construct
  misc_feature 1..20: note = C9Orf72 CTCN PAM targeting sequence
  source 1..20: mol_type = other RNA
aaattttccctttttatgag

SEQ ID NO: 17795 - RNA, 20 nt, synthetic construct
  misc_feature 1..20: note = C9Orf72 CTCN PAM targeting sequence
  source 1..20: mol_type = other RNA
taaaaagggaaaatttggag

SEQ ID NO: 17796 - RNA, 20 nt, synthetic construct
  misc_feature 1..20: note = C9Orf72 CTCN PAM targeting sequence
  source 1..20: mol_type = other RNA
aatctaaaatgactgctatc

SEQ ID NO: 17797 - RNA, 20 nt, synthetic construct
  misc_feature 1..20: note = C9Orf72 CTCN PAM targeting sequence
  source 1..20: mol_type = other RNA
agtatgacctcatgttaact

SEQ ID NO: 17798 - RNA, 20 nt, synthetic construct
  misc_feature 1..20: note = C9Orf72 CTCN PAM targeting sequence
  source 1..20: mol_type = other RNA
tgttaactgattattttctg

SEQ ID NO: 17799 - RNA, 20 nt, synthetic construct
  misc_feature 1..20: note = C9Orf72 CTCN PAM targeting sequence
  source 1..20: mol_type = other RNA
tcctgaaaagctctttaccc

SEQ ID NO: 17800 - RNA, 20 nt, synthetic construct
  misc_feature 1..20: note = C9Orf72 CTCN PAM targeting sequence
  source 1..20: mol_type = other RNA
ttacccagtgtggctgccat

SEQ ID NO: 17801 - RNA, 20 nt, synthetic construct
  misc_feature 1..20: note = C9Orf72 CTCN PAM targeting sequence
  source 1..20: mol_type = other RNA
tggcagccacactgggtaaa

SEQ ID NO: 17802 - RNA, 20 nt, synthetic construct
  misc_feature 1..20: note = C9Orf72 CTCN PAM targeting sequence
  source 1..20: mol_type = other RNA
ttgtaagttggatgtctaca

SEQ ID NO: 17803 - RNA, 20 nt, synthetic construct
  misc_feature 1..20: note = C9Orf72 CTCN PAM targeting sequence
  source 1..20: mol_type = other RNA
tagccagtaatactccttgt

SEQ ID NO: 17804 - RNA, 20 nt, synthetic construct
  misc_feature 1..20: note = C9Orf72 CTCN PAM targeting sequence
  source 1..20: mol_type = other RNA
gaaatccatctctgcatttg

SEQ ID NO: 17805 - RNA, 20 nt, synthetic construct
  misc_feature 1..20: note = C9Orf72 CTCN PAM targeting sequence
  source 1..20: mol_type = other RNA
gcatttgtgctgaagccaca

SEQ ID NO: 17806 - RNA, 20 nt, synthetic construct
  misc_feature 1..20: note = C9Orf72 CTCN PAM targeting sequence
  source 1..20: mol_type = other RNA
caggctactcctagatagtg

SEQ ID NO: 17807 - RNA, 20 nt, synthetic construct
  misc_feature 1..20: note = C9Orf72 CTCN PAM targeting sequence
  source 1..20: mol_type = other RNA
tagatagtgactgagcatgg

SEQ ID NO: 17808 - RNA, 20 nt, synthetic construct
  misc_feature 1..20: note = C9Orf72 CTCN PAM targeting sequence
  source 1..20: mol_type = other RNA
gtcactatctaggagtagcc

SEQ ID NO: 17809 - RNA, 20 nt, synthetic construct
  misc_feature 1..20: note = C9Orf72 CTCN PAM targeting sequence
  source 1..20: mol_type = other RNA
caggaataggtttgcatcac

SEQ ID NO: 17810 - RNA, 20 nt, synthetic construct
  misc_feature 1..20: note = C9Orf72 CTCN PAM targeting sequence
  source 1..20: mol_type = other RNA
taggtaagttttcatctccc

SEQ ID NO: 17811 - RNA, 20 nt, synthetic construct
  misc_feature 1..20: note = C9Orf72 CTCN PAM targeting sequence
  source 1..20: mol_type = other RNA
aagactcctccaagagatcc

SEQ ID NO: 17812 - RNA, 20 nt, synthetic construct
  misc_feature 1..20: note = C9Orf72 CTCN PAM targeting sequence
  source 1..20: mol_type = other RNA
tccaagagatccaggctctc

SEQ ID NO: 17813 - RNA, 20 nt, synthetic construct
  misc_feature 1..20: note = C9Orf72 CTCN PAM targeting sequence
  source 1..20: mol_type = other RNA
aagagatccaggctctcttg

SEQ ID NO: 17814 - RNA, 20 nt, synthetic construct
  misc_feature 1..20: note = C9Orf72 CTCN PAM targeting sequence
  source 1..20: mol_type = other RNA
tggaggagtctttgagtcca

SEQ ID NO: 17815 - RNA, 20 nt, synthetic construct
  misc_feature 1..20: note = C9Orf72 CTCN PAM targeting sequence
  source 1..20: mol_type = other RNA
cttgaaacagcacagccctg

SEQ ID NO: 17816 - RNA, 20 nt, synthetic construct
  misc_feature 1..20: note = C9Orf72 CTCN PAM targeting sequence
  source 1..20: mol_type = other RNA
tgaaacagcacagccctgta

SEQ ID NO: 17817 - RNA, 20 nt, synthetic construct
  misc_feature 1..20: note = C9Orf72 CTCN PAM targeting sequence
  source 1..20: mol_type = other RNA
ccctcctccctcccgtcttc

SEQ ID NO: 17818 - RNA, 20 nt, synthetic construct
  misc_feature 1..20: note = C9Orf72 CTCN PAM targeting sequence
  source 1..20: mol_type = other RNA
tccctcccgtcttcttcacc

SEQ ID NO: 17819 - RNA, 20 nt, synthetic construct
  misc_feature 1..20: note = C9Orf72 CTCN PAM targeting sequence
  source 1..20: mol_type = other RNA
ctcccgtcttcttcacctgg

SEQ ID NO: 17820 - RNA, 20 nt, synthetic construct
  misc_feature 1..20: note = C9Orf72 CTCN PAM targeting sequence
  source 1..20: mol_type = other RNA
cgtcttcttcacctggggtc

SEQ ID NO: 17821 - RNA, 20 nt, synthetic construct
  misc_feature 1..20: note = C9Orf72 CTCN PAM targeting sequence
  source 1..20: mol_type = other RNA
gattgtgatgcaggtctgac

SEQ ID NO: 17822 - RNA, 20 nt, synthetic construct
  misc_feature 1..20: note = C9Orf72 CTCN PAM targeting sequence
  source 1..20: mol_type = other RNA
tctgattgtgatgcaggtct

SEQ ID NO: 17823 - RNA, 20 nt, synthetic construct
  misc_feature 1..20: note = C9Orf72 CTCN PAM targeting sequence
  source 1..20: mol_type = other RNA
cgagctcccagcagctcact

SEQ ID NO: 17824 - RNA, 20 nt, synthetic construct
  misc_feature 1..20: note = C9Orf72 CTCN PAM targeting sequence
  source 1..20: mol_type = other RNA
ggagactcctctgattgtga

SEQ ID NO: 17825 - RNA, 20 nt, synthetic construct
  misc_feature 1..20: note = C9Orf72 CTCN PAM targeting sequence
  source 1..20: mol_type = other RNA
cagcagctcactcctacttt

SEQ ID NO: 17826 - RNA, 20 nt, synthetic construct
  misc_feature 1..20: note = C9Orf72 CTCN PAM targeting sequence
  source 1..20: mol_type = other RNA
ctcctactttccctcatagt

SEQ ID NO: 17827 - RNA, 20 nt, synthetic construct
  misc_feature 1..20: note = C9Orf72 CTCN PAM targeting sequence
  source 1..20: mol_type = other RNA
tactttccctcatagtcaga

SEQ ID NO: 17828 - RNA, 20 nt, synthetic construct
  misc_feature 1..20: note = C9Orf72 CTCN PAM targeting sequence
  source 1..20: mol_type = other RNA
tagtcagacagggcattcaa

SEQ ID NO: 17829 - RNA, 20 nt, synthetic construct
  misc_feature 1..20: note = C9Orf72 CTCN PAM targeting sequence
  source 1..20: mol_type = other RNA
gtgcttggttgaatactcct

SEQ ID NO: 17830 - RNA, 20 nt, synthetic construct
  misc_feature 1..20: note = C9Orf72 CTCN PAM targeting sequence
  source 1..20: mol_type = other RNA
tctgcagccatcttggaatt

SEQ ID NO: 17831 - RNA, 20 nt, synthetic construct
  misc_feature 1..20: note = C9Orf72 CTCN PAM targeting sequence
  source 1..20: mol_type = other RNA
gcagccatcttggaattctt

SEQ ID NO: 17832 - RNA, 20 nt, synthetic construct
  misc_feature 1..20: note = C9Orf72 CTCN PAM targeting sequence
  source 1..20: mol_type = other RNA
ttgttcaaaataacattaag

SEQ ID NO: 17833 - RNA, 20 nt, synthetic construct
  misc_feature 1..20: note = C9Orf72 CTCN PAM targeting sequence
  source 1..20: mol_type = other RNA
ctcttgctcacaggagttgc

SEQ ID NO: 17834 - RNA, 20 nt, synthetic construct
  misc_feature 1..20: note = C9Orf72 CTCN PAM targeting sequence
  source 1..20: mol_type = other RNA
tgctcacaggagttgcctta

SEQ ID NO: 17835 - RNA, 20 nt, synthetic construct
  misc_feature 1..20: note = C9Orf72 CTCN PAM targeting sequence
  source 1..20: mol_type = other RNA
caggagttgccttaataaat

SEQ ID NO: 17836 - RNA, 20 nt, synthetic construct
  misc_feature 1..20: note = C9Orf72 CTCN PAM targeting sequence
  source 1..20: mol_type = other RNA
tgtgagcaagagtgaggtca

SEQ ID NO: 17837 - RNA, 20 nt, synthetic construct
  misc_feature 1..20: note = C9Orf72 CTCN PAM targeting sequence
  source 1..20: mol_type = other RNA
tgcatagccaatcctgcctt

SEQ ID NO: 17838 - RNA, 20 nt, synthetic construct
  misc_feature 1..20: note = C9Orf72 CTCN PAM targeting sequence
  source 1..20: mol_type = other RNA
aagaagcattacgccaaggc

SEQ ID NO: 17839 - RNA, 20 nt, synthetic construct
  misc_feature 1..20: note = C9Orf72 CTCN PAM targeting sequence
  source 1..20: mol_type = other RNA
caccccagataccagcatga

SEQ ID NO: 17840 - RNA, 20 nt, synthetic construct
  misc_feature 1..20: note = C9Orf72 CTCN PAM targeting sequence
  source 1..20: mol_type = other RNA
aaggtcactcctcagagagg

SEQ ID NO: 17841 - RNA, 20 nt, synthetic construct
  misc_feature 1..20: note = C9Orf72 CTCN PAM targeting sequence
  source 1..20: mol_type = other RNA
tcagagaggtttcctttgcc

SEQ ID NO: 17842 - RNA, 20 nt, synthetic construct
  misc_feature 1..20: note = C9Orf72 CTCN PAM targeting sequence
  source 1..20: mol_type = other RNA
gagaggtttcctttgccacc

SEQ ID NO: 17843 - RNA, 20 nt, synthetic construct
  misc_feature 1..20: note = C9Orf72 CTCN PAM targeting sequence
  source 1..20: mol_type = other RNA
gaggagtgacctttgagcac

SEQ ID NO: 17844 - RNA, 20 nt, synthetic construct
  misc_feature 1..20: note = C9Orf72 CTCN PAM targeting sequence
  source 1..20: mol_type = other RNA
ctgaggagtgacctttgagc

SEQ ID NO: 17845 - RNA, 20 nt, synthetic construct
  misc_feature 1..20: note = C9Orf72 CTCN PAM targeting sequence
  source 1..20: mol_type = other RNA
ctctcccattctcctgcttt

SEQ ID NO: 17846 - RNA, 20 nt, synthetic construct
  misc_feature 1..20: note = C9Orf72 CTCN PAM targeting sequence
  source 1..20: mol_type = other RNA
ctcccattctcctgctttaa

SEQ ID NO: 17847 - RNA, 20 nt, synthetic construct
  misc_feature 1..20: note = C9Orf72 CTCN PAM targeting sequence
  source 1..20: mol_type = other RNA
cccattctcctgctttaatt

SEQ ID NO: 17848 - RNA, 20 nt, synthetic construct
  misc_feature 1..20: note = C9Orf72 CTCN PAM targeting sequence
  source 1..20: mol_type = other RNA
cattctcctgctttaatttt

SEQ ID NO: 17849 - RNA, 20 nt, synthetic construct
  misc_feature 1..20: note = C9Orf72 CTCN PAM targeting sequence
  source 1..20: mol_type = other RNA
tgctttaattttcttcatcg

SEQ ID NO: 17850 - RNA, 20 nt, synthetic construct
  misc_feature 1..20: note = C9Orf72 CTCN PAM targeting sequence
  source 1..20: mol_type = other RNA
agctgattttactatatgtt

SEQ ID NO: 17851 - RNA, 20 nt, synthetic construct
  misc_feature 1..20: note = C9Orf72 CTCN PAM targeting sequence
  source 1..20: mol_type = other RNA
tgggaaagacaaaacaaaca

SEQ ID NO: 17852 - RNA, 20 nt, synthetic construct
  misc_feature 1..20: note = C9Orf72 CTCN PAM targeting sequence
  source 1..20: mol_type = other RNA
tgtatagtttacattctcat

SEQ ID NO: 17853 - RNA, 20 nt, synthetic construct
  misc_feature 1..20: note = C9Orf72 CTCN PAM targeting sequence
  source 1..20: mol_type = other RNA
caaaccatttattggccacc

SEQ ID NO: 17854 - RNA, 20 nt, synthetic construct
  misc_feature 1..20: note = C9Orf72 CTCN PAM targeting sequence
  source 1..20: mol_type = other RNA
ttcagttccaaaatataagc

SEQ ID NO: 17855 - RNA, 20 nt, synthetic construct
  misc_feature 1..20: note = C9Orf72 CTCN PAM targeting sequence
  source 1..20: mol_type = other RNA
tatacctgtaagacataact

SEQ ID NO: 17856 - RNA, 20 nt, synthetic construct
  misc_feature 1..20: note = C9Orf72 CTCN PAM targeting sequence
  source 1..20: mol_type = other RNA
ttcttattggtttagctttg

SEQ ID NO: 17857 - RNA, 20 nt, synthetic construct
  misc_feature 1..20: note = C9Orf72 CTCN PAM targeting sequence
  source 1..20: mol_type = other RNA
cattcttattggtttagctt

SEQ ID NO: 17858 - RNA, 20 nt, synthetic construct
  misc_feature 1..20: note = C9Orf72 CTCN PAM targeting sequence
  source 1..20: mol_type = other RNA
gggtgatagcagtatttgct

SEQ ID NO: 17859 - RNA, 20 nt, synthetic construct
  misc_feature 1..20: note = C9Orf72 CTCN PAM targeting sequence
  source 1..20: mol_type = other RNA
aatgggcatcccagccctaa

SEQ ID NO: 17860 - RNA, 20 nt, synthetic construct
  misc_feature 1..20: note = C9Orf72 CTCN PAM targeting sequence
  source 1..20: mol_type = other RNA
tgcaaggtaagatgctggaa

SEQ ID NO: 17861 - RNA, 20 nt, synthetic construct
  misc_feature 1..20: note = C9Orf72 CTCN PAM targeting sequence
  source 1..20: mol_type = other RNA
aagtagctcagggaaggggg

SEQ ID NO: 17862 - RNA, 20 nt, synthetic construct
  misc_feature 1..20: note = C9Orf72 CTCN PAM targeting sequence
  source 1..20: mol_type = other RNA
gggaagggggaagtaagtct

SEQ ID NO: 17863 - RNA, 20 nt, synthetic construct
  misc_feature 1..20: note = C9Orf72 CTCN PAM targeting sequence
  source 1..20: mol_type = other RNA
agtatcagggtgaaaaaaaa

SEQ ID NO: 17864 - RNA, 20 nt, synthetic construct
  misc_feature 1..20: note = C9Orf72 CTCN PAM targeting sequence
  source 1..20: mol_type = other RNA
aattgttctgtagaaatatt

SEQ ID NO: 17865 - RNA, 20 nt, synthetic construct
  misc_feature 1..20: note = C9Orf72 CTCN PAM targeting sequence
  source 1..20: mol_type = other RNA
ggacctacaagactccctca

SEQ ID NO: 17866 - RNA, 20 nt, synthetic construct
  misc_feature 1..20: note = C9Orf72 CTCN PAM targeting sequence
  source 1..20: mol_type = other RNA
ctcagaataaacaattcctg

SEQ ID NO: 17867 - RNA, 20 nt, synthetic construct
  misc_feature 1..20: note = C9Orf72 CTCN PAM targeting sequence
  source 1..20: mol_type = other RNA
gaataaacaattcctgctga

SEQ ID NO: 17868 - RNA, 20 nt, synthetic construct
  misc_feature 1..20: note = C9Orf72 CTCN PAM targeting sequence
  source 1..20: mol_type = other RNA
ttctgactggcttcattctt

SEQ ID NO: 17869 - RNA, 20 nt, synthetic construct
  misc_feature 1..20: note = C9Orf72 CTCN PAM targeting sequence
  source 1..20: mol_type = other RNA
ttgtgtacgtggcttctcct

SEQ ID NO: 17870 - RNA, 20 nt, synthetic construct
  misc_feature 1..20: note = C9Orf72 CTCN PAM targeting sequence
  source 1..20: mol_type = other RNA
aagaacttacagtaagagaa

SEQ ID NO: 17871 - RNA, 20 nt, synthetic construct
  misc_feature 1..20: note = C9Orf72 CTCN PAM targeting sequence
  source 1..20: mol_type = other RNA
tactgtaagttcttagaggt

SEQ ID NO: 17872 - RNA, 20 nt, synthetic construct
  misc_feature 1..20: note = C9Orf72 CTCN PAM targeting sequence
  source 1..20: mol_type = other RNA
tctttaagaattcaaattag

SEQ ID NO: 17873 - RNA, 20 nt, synthetic construct
  misc_feature 1..20: note = C9Orf72 CTCN PAM targeting sequence
  source 1..20: mol_type = other RNA
tttcagctgtatctaatatg

SEQ ID NO: 17874 - RNA, 20 nt, synthetic construct
  misc_feature 1..20: note = C9Orf72 CTCN PAM targeting sequence
  source 1..20: mol_type = other RNA
attcagaacacttctttaga

SEQ ID NO: 17875 - RNA, 20 nt, synthetic construct
  misc_feature 1..20: note = C9Orf72 CTCN PAM targeting sequence
  source 1..20: mol_type = other RNA
gctccattcagaacacttct

SEQ ID NO: 17876 - RNA, 20 nt, synthetic construct
  misc_feature 1..20: note = C9Orf72 CTCN PAM targeting sequence
  source 1..20: mol_type = other RNA
ttcacattttttgatccctt

SEQ ID NO: 17877 - RNA, 20 nt, synthetic construct
  misc_feature 1..20: note = C9Orf72 CTCN PAM targeting sequence
  source 1..20: mol_type = other RNA
ctttcacattttttgatccc

SEQ ID NO: 17878 - RNA, 20 nt, synthetic construct
  misc_feature 1..20: note = C9Orf72 CTCN PAM targeting sequence
  source 1..20: mol_type = other RNA
gtgtttataacctctctttc

SEQ ID NO: 17879 - RNA, 20 nt, synthetic construct
  misc_feature 1..20: note = C9Orf72 CTCN PAM targeting sequence
  source 1..20: mol_type = other RNA
ctgtgtttataacctctctt

SEQ ID NO: 17880 - RNA, 20 nt, synthetic construct
  misc_feature 1..20: note = C9Orf72 CTCN PAM targeting sequence
  source 1..20: mol_type = other RNA
agaacttcaattaaatgtgt

SEQ ID NO: 17881 - RNA, 20 nt, synthetic construct
  misc_feature 1..20: note = C9Orf72 CTCN PAM targeting sequence
  source 1..20: mol_type = other RNA
ttctccagaacttcaattaa

SEQ ID NO: 17882 - RNA, 20 nt, synthetic construct
  misc_feature 1..20: note = C9Orf72 CTCN PAM targeting sequence
  source 1..20: mol_type = other RNA
cataacctactccttctcca

SEQ ID NO: 17883 - RNA, 20 nt, synthetic construct
  misc_feature 1..20: note = C9Orf72 CTCN PAM targeting sequence
  source 1..20: mol_type = other RNA
cacataacctactccttctc

SEQ ID NO: 17884 - RNA, 20 nt, synthetic construct
  misc_feature 1..20: note = C9Orf72 CTCN PAM targeting sequence
  source 1..20: mol_type = other RNA
gcttttatcatttcagtatt

SEQ ID NO: 17885 - RNA, 20 nt, synthetic construct
  misc_feature 1..20: note = C9Orf72 CTCN PAM targeting sequence
  source 1..20: mol_type = other RNA
ttggtgctagtgttctgcca

SEQ ID NO: 17886 - RNA, 20 nt, synthetic construct
  misc_feature 1..20: note = C9Orf72 CTCN PAM targeting sequence
  source 1..20: mol_type = other RNA
ggttgcttgtatgactttct

SEQ ID NO: 17887 - RNA, 20 nt, synthetic construct
  misc_feature 1..20: note = C9Orf72 CTCN PAM targeting sequence
  source 1..20: mol_type = other RNA
ctggttgcttgtatgacttt

SEQ ID NO: 17888 - RNA, 20 nt, synthetic construct
  misc_feature 1..20: note = C9Orf72 CTCN PAM targeting sequence
  source 1..20: mol_type = other RNA
gtattattgatgaaaagtcc

SEQ ID NO: 17889 - RNA, 20 nt, synthetic construct
  misc_feature 1..20: note = C9Orf72 CTCN PAM targeting sequence
  source 1..20: mol_type = other RNA
aaaatgggggtattttaacc

SEQ ID NO: 17890 - RNA, 20 nt, synthetic construct
  misc_feature 1..20: note = C9Orf72 CTCN PAM targeting sequence
  source 1..20: mol_type = other RNA
caggtctggaggctgggaag

SEQ ID NO: 17891 - RNA, 20 nt, synthetic construct
  misc_feature 1..20: note = C9Orf72 CTCN PAM targeting sequence
  source 1..20: mol_type = other RNA
agacctgtgaggaaataaat

SEQ ID NO: 17892 - RNA, 20 nt, synthetic construct
  misc_feature 1..20: note = C9Orf72 CTCN PAM targeting sequence
  source 1..20: mol_type = other RNA
tggacttcccagcctccaga

SEQ ID NO: 17893 - RNA, 20 nt, synthetic construct
  misc_feature 1..20: note = C9Orf72 CTCN PAM targeting sequence
  source 1..20: mol_type = other RNA
tgcccatatgatgccttctg

SEQ ID NO: 17894 - RNA, 20 nt, synthetic construct
  misc_feature 1..20: note = C9Orf72 CTCN PAM targeting sequence
  source 1..20: mol_type = other RNA
cttgcccatatgatgccttc

SEQ ID NO: 17895 - RNA, 20 nt, synthetic construct
  misc_feature 1..20: note = C9Orf72 CTCN PAM targeting sequence
  source 1..20: mol_type = other RNA
ctcttgcccatatgatgcct

SEQ ID NO: 17896 - RNA, 20 nt, synthetic construct
  misc_feature 1..20: note = C9Orf72 CTCN PAM targeting sequence
  source 1..20: mol_type = other RNA
ctctcttgcccatatgatgc

SEQ ID NO: 17897 - RNA, 20 nt, synthetic construct
  misc_feature 1..20: note = C9Orf72 CTCN PAM targeting sequence
  source 1..20: mol_type = other RNA
ctctctcttgcccatatgat

SEQ ID NO: 17898 - RNA, 20 nt, synthetic construct
  misc_feature 1..20: note = C9Orf72 CTCN PAM targeting sequence
  source 1..20: mol_type = other RNA
ttccctctctctctcttgcc

SEQ ID NO: 17899 - RNA, 20 nt, synthetic construct
  misc_feature 1..20: note = C9Orf72 CTCN PAM targeting sequence
  source 1..20: mol_type = other RNA
tcctttataagaaacccctt

SEQ ID NO: 17900 - RNA, 20 nt, synthetic construct
  misc_feature 1..20: note = C9Orf72 CTCN PAM targeting sequence
  source 1..20: mol_type = other RNA
tactacaatgaacttactcc

SEQ ID NO: 17901 - RNA, 20 nt, synthetic construct
  misc_feature 1..20: note = C9Orf72 CTCN PAM targeting sequence
  source 1..20: mol_type = other RNA
catgataatggcattaatcc

SEQ ID NO: 17902 - RNA, 20 nt, synthetic construct
  misc_feature 1..20: note = C9Orf72 CTCN PAM targeting sequence
  source 1..20: mol_type = other RNA
tgaatggattaatgccatta

SEQ ID NO: 17903 - RNA, 20 nt, synthetic construct
  misc_feature 1..20: note = C9Orf72 CTCN PAM targeting sequence
  source 1..20: mol_type = other RNA
taaacttcccacctctcaac

SEQ ID NO: 17904 - RNA, 20 nt, synthetic construct
  misc_feature 1..20: note = C9Orf72 CTCN PAM targeting sequence
  source 1..20: mol_type = other RNA
caacactgatgcattgagga

SEQ ID NO: 17905 - RNA, 20 nt, synthetic construct
  misc_feature 1..20: note = C9Orf72 CTCN PAM targeting sequence
  source 1..20: mol_type = other RNA
acactgatgcattgaggatt

SEQ ID NO: 17906 - RNA, 20 nt, synthetic construct
  misc_feature 1..20: note = C9Orf72 CTCN PAM targeting sequence
  source 1..20: mol_type = other RNA
atgcatcagtgttgagaggt

SEQ ID NO: 17907 - RNA, 20 nt, synthetic construct
  misc_feature 1..20: note = C9Orf72 CTCN PAM targeting sequence
  source 1..20: mol_type = other RNA
taaaattcatgtgctagaaa

SEQ ID NO: 17908 - RNA, 20 nt, synthetic construct
  misc_feature 1..20: note = C9Orf72 CTCN PAM targeting sequence
  source 1..20: mol_type = other RNA
gtttgaatatgtctcctaaa

SEQ ID NO: 17909 - RNA, 20 nt, synthetic construct
  misc_feature 1..20: note = C9Orf72 CTCN PAM targeting sequence
  source 1..20: mol_type = other RNA
tttttggtatgaatatgttt

SEQ ID NO: 17910 - RNA, 20 nt, synthetic construct
  misc_feature 1..20: note = C9Orf72 CTCN PAM targeting sequence
  source 1..20: mol_type = other RNA
cttttttggtatgaatatgt

SEQ ID NO: 17911 - RNA, 20 nt, synthetic construct
  misc_feature 1..20: note = C9Orf72 CTCN PAM targeting sequence
  source 1..20: mol_type = other RNA
aaaaaaatttttaagattaa

SEQ ID NO: 17912 - RNA, 20 nt, synthetic construct
  misc_feature 1..20: note = C9Orf72 CTCN PAM targeting sequence
  source 1..20: mol_type = other RNA
ttcatattattgctatctga

SEQ ID NO: 17913 - RNA, 20 nt, synthetic construct
  misc_feature 1..20: note = C9Orf72 CTCN PAM targeting sequence
  source 1..20: mol_type = other RNA
atggcccttgcattacgtga

SEQ ID NO: 17914 - RNA, 20 nt, synthetic construct
  misc_feature 1..20: note = C9Orf72 CTCN PAM targeting sequence
  source 1..20: mol_type = other RNA
tgctttgggaggccaaggca

SEQ ID NO: 17915 - RNA, 20 nt, synthetic construct
  misc_feature 1..20: note = C9Orf72 CTCN PAM targeting sequence
  source 1..20: mol_type = other RNA
caaagcacgagcttagcttt

SEQ ID NO: 17916 - RNA, 20 nt, synthetic construct
  misc_feature 1..20: note = C9Orf72 CTCN PAM targeting sequence
  source 1..20: mol_type = other RNA
tgccttggcctcccaaagca

SEQ ID NO: 17917 - RNA, 20 nt, synthetic construct
  misc_feature 1..20: note = C9Orf72 CTCN PAM targeting sequence
  source 1..20: mol_type = other RNA
tggcctgaagcaaacctcct

SEQ ID NO: 17918 - RNA, 20 nt, synthetic construct
  misc_feature 1..20: note = C9Orf72 CTCN PAM targeting sequence
  source 1..20: mol_type = other RNA
ctatgttgcccaggctggcc

SEQ ID NO: 17919 - RNA, 20 nt, synthetic construct
  misc_feature 1..20: note = C9Orf72 CTCN PAM targeting sequence
  source 1..20: mol_type = other RNA
acaaaaagttttaaaaatta

SEQ ID NO: 17920 - RNA, 20 nt, synthetic construct
  misc_feature 1..20: note = C9Orf72 CTCN PAM targeting sequence
  source 1..20: mol_type = other RNA
agtagctaggactatagata

SEQ ID NO: 17921 - RNA, 20 nt, synthetic construct
  misc_feature 1..20: note = C9Orf72 CTCN PAM targeting sequence
  source 1..20: mol_type = other RNA
gcttctcaagtagctaggac

SEQ ID NO: 17922 - RNA, 20 nt, synthetic construct
  misc_feature 1..20: note = C9Orf72 CTCN PAM targeting sequence
  source 1..20: mol_type = other RNA
tgcctcagcttctcaagtag

SEQ ID NO: 17923 - RNA, 20 nt, synthetic construct
  misc_feature 1..20: note = C9Orf72 CTCN PAM targeting sequence
  source 1..20: mol_type = other RNA
ctgttaccttgaattcctgg

SEQ ID NO: 17924 - RNA, 20 nt, synthetic construct
  misc_feature 1..20: note = C9Orf72 CTCN PAM targeting sequence
  source 1..20: mol_type = other RNA
gttgcccaggctgaagtgca

SEQ ID NO: 17925 - RNA, 20 nt, synthetic construct
  misc_feature 1..20: note = C9Orf72 CTCN PAM targeting sequence
  source 1..20: mol_type = other RNA
ttaaaaaaaaaaaaaaaagg

SEQ ID NO: 17926 - RNA, 20 nt, synthetic construct
  misc_feature 1..20: note = C9Orf72 CTCN PAM targeting sequence
  source 1..20: mol_type = other RNA
tttcccctgaaaatattata

SEQ ID NO: 17927 - RNA, 20 nt, synthetic construct
  misc_feature 1..20: note = C9Orf72 CTCN PAM targeting sequence
  source 1..20: mol_type = other RNA
catttccttcctcatttccc

SEQ ID NO: 17928 - RNA, 20 nt, synthetic construct
  misc_feature 1..20: note = C9Orf72 CTCN PAM targeting sequence
  source 1..20: mol_type = other RNA
cccatttccttcctcatttc

SEQ ID NO: 17929 - RNA, 20 nt, synthetic construct
  misc_feature 1..20: note = C9Orf72 CTCN PAM targeting sequence
  source 1..20: mol_type = other RNA
aagaaaaaaaaaagttatgc

SEQ ID NO: 17930 - RNA, 20 nt, synthetic construct
  misc_feature 1..20: note = C9Orf72 CTCN PAM targeting sequence
  source 1..20: mol_type = other RNA
gtctcaaagaaaaaaaaaag

SEQ ID NO: 17931 - RNA, 20 nt, synthetic construct
  misc_feature 1..20: note = C9Orf72 CTCN PAM targeting sequence
  source 1..20: mol_type = other RNA
ctctgttgcccaggctggag

SEQ ID NO: 17932 - RNA, 20 nt, synthetic construct
  misc_feature 1..20: note = C9Orf72 CTCN PAM targeting sequence
  source 1..20: mol_type = other RNA
gttgcccaggctggagtgtg

SEQ ID NO: 17933 - RNA, 20 nt, synthetic construct
  misc_feature 1..20: note = C9Orf72 CTCN PAM targeting sequence
  source 1..20: mol_type = other RNA
agcctgggcaacagagtgag

SEQ ID NO: 17934 - RNA, 20 nt, synthetic construct
  misc_feature 1..20: note = C9Orf72 CTCN PAM targeting sequence
  source 1..20: mol_type = other RNA
gctcactgcaactgcaacct

SEQ ID NO: 17935 - RNA, 20 nt, synthetic construct
  misc_feature 1..20: note = C9Orf72 CTCN PAM targeting sequence
  source 1..20: mol_type = other RNA
ctgcaactgcaacctctgcc

SEQ ID NO: 17936 - RNA, 20 nt, synthetic construct
  misc_feature 1..20: note = C9Orf72 CTCN PAM targeting sequence
  source 1..20: mol_type = other RNA
gcctcctgcctcagtctctc

SEQ ID NO: 17937 - RNA, 20 nt, synthetic construct
  misc_feature 1..20: note = C9Orf72 CTCN PAM targeting sequence
  source 1..20: mol_type = other RNA
tgcctcagtctctcaagtaa

SEQ ID NO: 17938 - RNA, 20 nt, synthetic construct
  misc_feature 1..20: note = C9Orf72 CTCN PAM targeting sequence
  source 1..20: mol_type = other RNA
gtctctcaagtaactgggac

SEQ ID NO: 17939 - RNA, 20 nt, synthetic construct
  misc_feature 1..20: note = C9Orf72 CTCN PAM targeting sequence
  source 1..20: mol_type = other RNA
caagtaactgggactacagg

SEQ ID NO: 17940 - RNA, 20 nt, synthetic construct
  misc_feature 1..20: note = C9Orf72 CTCN PAM targeting sequence
  source 1..20: mol_type = other RNA
agtaactgggactacaggca

SEQ ID NO: 17941 - RNA, 20 nt, synthetic construct
  misc_feature 1..20: note = C9Orf72 CTCN PAM targeting sequence
  source 1..20: mol_type = other RNA
aaaaaaaaaaaaaatagctg

SEQ ID NO: 17942 - RNA, 20 nt, synthetic construct
  misc_feature 1..20: note = C9Orf72 CTCN PAM targeting sequence
  source 1..20: mol_type = other RNA
gtctcaaaaaaaaaaaaaaa

SEQ ID NO: 17943 - RNA, 20 nt, synthetic construct
  misc_feature 1..20: note = C9Orf72 CTCN PAM targeting sequence
  source 1..20: mol_type = other RNA
ctctgtcacccaggctggag

SEQ ID NO: 17944 - RNA, 20 nt, synthetic construct
  misc_feature 1..20: note = C9Orf72 CTCN PAM targeting sequence
  source 1..20: mol_type = other RNA
gtcacccaggctggagtgca

SEQ ID NO: 17945 - RNA, 20 nt, synthetic construct
  misc_feature 1..20: note = C9Orf72 CTCN PAM targeting sequence
  source 1..20: mol_type = other RNA
agcctgggtgacagagcgag

SEQ ID NO: 17946 - RNA, 20 nt, synthetic construct
  misc_feature 1..20: note = C9Orf72 CTCN PAM targeting sequence
  source 1..20: mol_type = other RNA
gctcactgcaagctccgcct

SEQ ID NO: 17947 - RNA, 20 nt, synthetic construct
  misc_feature 1..20: note = C9Orf72 CTCN PAM targeting sequence
  source 1..20: mol_type = other RNA
ctgcaagctccgcctcctgg

SEQ ID NO: 17948 - RNA, 20 nt, synthetic construct
  misc_feature 1..20: note = C9Orf72 CTCN PAM targeting sequence
  source 1..20: mol_type = other RNA
gcctcctgggttcacgccat

SEQ ID NO: 17949 - RNA, 20 nt, synthetic construct
  misc_feature 1..20: note = C9Orf72 CTCN PAM targeting sequence
  source 1..20: mol_type = other RNA
tgggttcacgccattctcct

SEQ ID NO: 17950 - RNA, 20 nt, synthetic construct
  misc_feature 1..20: note = C9Orf72 CTCN PAM targeting sequence
  source 1..20: mol_type = other RNA
tgcctcagcctccggagtag

SEQ ID NO: 17951 - RNA, 20 nt, synthetic construct
  misc_feature 1..20: note = C9Orf72 CTCN PAM targeting sequence
  source 1..20: mol_type = other RNA
gcctccggagtagctgggac

SEQ ID NO: 17952 - RNA, 20 nt, synthetic construct
  misc_feature 1..20: note = C9Orf72 CTCN PAM targeting sequence
  source 1..20: mol_type = other RNA
ggagtagctgggactacagg

SEQ ID NO: 17953 - RNA, 20 nt, synthetic construct
  misc_feature 1..20: note = C9Orf72 CTCN PAM targeting sequence
  source 1..20: mol_type = other RNA
ggaggctgaggcaggagaat

SEQ ID NO: 17954 - RNA, 20 nt, synthetic construct
  misc_feature 1..20: note = C9Orf72 CTCN PAM targeting sequence
  source 1..20: mol_type = other RNA
gctaattttttgcatttttt

SEQ ID NO: 17955 - RNA, 20 nt, synthetic construct
  misc_feature 1..20: note = C9Orf72 CTCN PAM targeting sequence
  source 1..20: mol_type = other RNA
actaaaaaatgcaaaaaatt

SEQ ID NO: 17956 - RNA, 20 nt, synthetic construct
  misc_feature 1..20: note = C9Orf72 CTCN PAM targeting sequence
  source 1..20: mol_type = other RNA
tgaccttgtgatccgactgc

SEQ ID NO: 17957 - RNA, 20 nt, synthetic construct
  misc_feature 1..20: note = C9Orf72 CTCN PAM targeting sequence
  source 1..20: mol_type = other RNA
gcctcccaaagtgctaggat

SEQ ID NO: 17958 - RNA, 20 nt, synthetic construct
  misc_feature 1..20: note = C9Orf72 CTCN PAM targeting sequence
  source 1..20: mol_type = other RNA
caaagtgctaggattacaga

SEQ ID NO: 17959 - RNA, 20 nt, synthetic construct
  misc_feature 1..20: note = C9Orf72 CTCN PAM targeting sequence
  source 1..20: mol_type = other RNA
catctgtaatcctagcactt

SEQ ID NO: 17960 - RNA, 20 nt, synthetic construct
  misc_feature 1..20: note = C9Orf72 CTCN PAM targeting sequence
  source 1..20: mol_type = other RNA
actaaaaatacaaaaattag

SEQ ID NO: 17961 - RNA, 20 nt, synthetic construct
  misc_feature 1..20: note = C9Orf72 CTCN PAM targeting sequence
  source 1..20: mol_type = other RNA
tgatctgcctgcctgggcct

SEQ ID NO: 17962 - RNA, 20 nt, synthetic construct
  misc_feature 1..20: note = C9Orf72 CTCN PAM targeting sequence
  source 1..20: mol_type = other RNA
cgcctgtaatcccagcactt

SEQ ID NO: 17963 - RNA, 20 nt, synthetic construct
  misc_feature 1..20: note = C9Orf72 CTCN PAM targeting sequence
  source 1..20: mol_type = other RNA
aatgagacatatacagacaa

SEQ ID NO: 17964 - RNA, 20 nt, synthetic construct
  misc_feature 1..20: note = C9Orf72 CTCN PAM targeting sequence
  source 1..20: mol_type = other RNA
tttgagtattctttttcccc

SEQ ID NO: 17965 - RNA, 20 nt, synthetic construct
  misc_feature 1..20: note = C9Orf72 CTCN PAM targeting sequence
  source 1..20: mol_type = other RNA
taattctttcttatattctt

SEQ ID NO: 17966 - RNA, 20 nt, synthetic construct
  misc_feature 1..20: note = C9Orf72 CTCN PAM targeting sequence
  source 1..20: mol_type = other RNA
ataaaagaataaaagaaacg

SEQ ID NO: 17967 - RNA, 20 nt, synthetic construct
  misc_feature 1..20: note = C9Orf72 CTCN PAM targeting sequence
  source 1..20: mol_type = other RNA
acaaggcatcgtttctttta

SEQ ID NO: 17968 - RNA, 20 nt, synthetic construct
  misc_feature 1..20: note = C9Orf72 CTCN PAM targeting sequence
  source 1..20: mol_type = other RNA
aaagactagtgtaagaattg

SEQ ID NO: 17969 - RNA, 20 nt, synthetic construct
  misc_feature 1..20: note = C9Orf72 CTCN PAM targeting sequence
  source 1..20: mol_type = other RNA
ccgcaattcttacactagtc

SEQ ID NO: 17970 - RNA, 20 nt, synthetic construct
  misc_feature 1..20: note = C9Orf72 CTCN PAM targeting sequence
  source 1..20: mol_type = other RNA
gaaagaataaaacagtatgc

SEQ ID NO: 17971 - RNA, 20 nt, synthetic construct
  misc_feature 1..20: note = C9Orf72 CTCN PAM targeting sequence
  source 1..20: mol_type = other RNA
gaaaggcatactgttttatt

SEQ ID NO: 17972 - RNA, 20 nt, synthetic construct
  misc_feature 1..20: note = C9Orf72 CTCN PAM targeting sequence
  source 1..20: mol_type = other RNA
gttttttcttctgcaccact

SEQ ID NO: 17973 - RNA, 20 nt, synthetic construct
  misc_feature 1..20: note = C9Orf72 CTCN PAM targeting sequence
  source 1..20: mol_type = other RNA
ctctgttttttcttctgcac

SEQ ID NO: 17974 - RNA, 20 nt, synthetic construct
  misc_feature 1..20: note = C9Orf72 CTCN PAM targeting sequence
  source 1..20: mol_type = other RNA
ctcatccataaaaagacaaa

SEQ ID NO: 17975 - RNA, 20 nt, synthetic construct
  misc_feature 1..20: note = C9Orf72 CTCN PAM targeting sequence
  source 1..20: mol_type = other RNA
tccataaaaagacaaaaaag

SEQ ID NO: 17976 - RNA, 20 nt, synthetic construct
  misc_feature 1..20: note = C9Orf72 CTCN PAM targeting sequence
  source 1..20: mol_type = other RNA
ccttttttgtctttttatgg

SEQ ID NO: 17977 - RNA, 20 nt, synthetic construct
  misc_feature 1..20: note = C9Orf72 CTCN PAM targeting sequence
  source 1..20: mol_type = other RNA
agcagatatggactaaaata

SEQ ID NO: 17978 - RNA, 20 nt, synthetic construct
  misc_feature 1..20: note = C9Orf72 CTCN PAM targeting sequence
  source 1..20: mol_type = other RNA
agctaaaagatgatggcaaa

SEQ ID NO: 17979 - RNA, 20 nt, synthetic construct
  misc_feature 1..20: note = C9Orf72 CTCN PAM targeting sequence
  source 1..20: mol_type = other RNA
gccccagtaagcatttcagt

SEQ ID NO: 17980 - RNA, 20 nt, synthetic construct
  misc_feature 1..20: note = C9Orf72 CTCN PAM targeting sequence
  source 1..20: mol_type = other RNA
gttatgtgacctactctgcc

SEQ ID NO: 17981 - RNA, 20 nt, synthetic construct
  misc_feature 1..20: note = C9Orf72 CTCN PAM targeting sequence
  source 1..20: mol_type = other RNA
tcagggtcagggagacaata

SEQ ID NO: 17982 - RNA, 20 nt, synthetic construct
  misc_feature 1..20: note = C9Orf72 CTCN PAM targeting sequence
  source 1..20: mol_type = other RNA
gggtcagggagacaatagag

SEQ ID NO: 17983 - RNA, 20 nt, synthetic construct
  misc_feature 1..20: note = C9Orf72 CTCN PAM targeting sequence
  source 1..20: mol_type = other RNA
ctgaccctgaggagacatca

SEQ ID NO: 17984 - RNA, 20 nt, synthetic construct
  misc_feature 1..20: note = C9Orf72 CTCN PAM targeting sequence
  source 1..20: mol_type = other RNA
attgtctccctgaccctgag

SEQ ID NO: 17985 - RNA, 20 nt, synthetic construct
  misc_feature 1..20: note = C9Orf72 CTCN PAM targeting sequence
  source 1..20: mol_type = other RNA
aaaaaaaaaaaaaacaaaaa

SEQ ID NO: 17986 - RNA, 20 nt, synthetic construct
  misc_feature 1..20: note = C9Orf72 CTCN PAM targeting sequence
  source 1..20: mol_type = other RNA
gtctcaaaaaaaaaaaaaaa

SEQ ID NO: 17987 - RNA, 20 nt, synthetic construct
  misc_feature 1..20: note = C9Orf72 CTCN PAM targeting sequence
  source 1..20: mol_type = other RNA
gtcgcccaggctggagtgca

SEQ ID NO: 17988 - RNA, 20 nt, synthetic construct
  misc_feature 1..20: note = C9Orf72 CTCN PAM targeting sequence
  source 1..20: mol_type = other RNA
agcctgggcgacagagctag

SEQ ID NO: 17989 - RNA, 20 nt, synthetic construct
  misc_feature 1..20: note = C9Orf72 CTCN PAM targeting sequence
  source 1..20: mol_type = other RNA
tgcactccagcctgggcgac

SEQ ID NO: 17990 - RNA, 20 nt, synthetic construct
  misc_feature 1..20: note = C9Orf72 CTCN PAM targeting sequence
  source 1..20: mol_type = other RNA
gctcactgcaagctccgcct

SEQ ID NO: 17991 - RNA, 20 nt, synthetic construct
  misc_feature 1..20: note = C9Orf72 CTCN PAM targeting sequence
  source 1..20: mol_type = other RNA
ctgcaagctccgcctcccag

SEQ ID NO: 17992 - RNA, 20 nt, synthetic construct
  misc_feature 1..20: note = C9Orf72 CTCN PAM targeting sequence
  source 1..20: mol_type = other RNA
gcctcccaggtttatgccac

SEQ ID NO: 17993 - RNA, 20 nt, synthetic construct
  misc_feature 1..20: note = C9Orf72 CTCN PAM targeting sequence
  source 1..20: mol_type = other RNA
caggtttatgccactctcct

SEQ ID NO: 17994 - RNA, 20 nt, synthetic construct
  misc_feature 1..20: note = C9Orf72 CTCN PAM targeting sequence
  source 1..20: mol_type = other RNA
cctgcctcagcctcccaagt

SEQ ID NO: 17995 - RNA, 20 nt, synthetic construct
  misc_feature 1..20: note = C9Orf72 CTCN PAM targeting sequence
  source 1..20: mol_type = other RNA
tgcctcagcctcccaagtag

SEQ ID NO: 17996 - RNA, 20 nt, synthetic construct
  misc_feature 1..20: note = C9Orf72 CTCN PAM targeting sequence
  source 1..20: mol_type = other RNA
gcctcccaagtagctgggac

SEQ ID NO: 17997 - RNA, 20 nt, synthetic construct
  misc_feature 1..20: note = C9Orf72 CTCN PAM targeting sequence
  source 1..20: mol_type = other RNA
caagtagctgggactacagg

SEQ ID NO: 17998 - RNA, 20 nt, synthetic construct
  misc_feature 1..20: note = C9Orf72 CTCN PAM targeting sequence
  source 1..20: mol_type = other RNA
actaaaaatacaaaaaatta

SEQ ID NO: 17999 - RNA, 20 nt, synthetic construct
  misc_feature 1..20: note = C9Orf72 CTCN PAM targeting sequence
  source 1..20: mol_type = other RNA
atctcctgacctcatgatct

SEQ ID NO: 18000 - RNA, 20 nt, synthetic construct
  misc_feature 1..20: note = C9Orf72 CTCN PAM targeting sequence
  source 1..20: mol_type = other RNA
tgacctcatgatctgcccgc

SEQ ID NO: 18001 - RNA, 20 nt, synthetic construct
  misc_feature 1..20: note = C9Orf72 CTCN PAM targeting sequence
  source 1..20: mol_type = other RNA
tgatctgcccgcctcggcct

SEQ ID NO: 18002 - RNA, 20 nt, synthetic construct
  misc_feature 1..20: note = C9Orf72 CTCN PAM targeting sequence
  source 1..20: mol_type = other RNA
gcctcccaaagtgcaaggat

SEQ ID NO: 18003 - RNA, 20 nt, synthetic construct
  misc_feature 1..20: note = C9Orf72 CTCN PAM targeting sequence
  source 1..20: mol_type = other RNA
caaagtgcaaggattacagg

SEQ ID NO: 18004 - RNA, 20 nt, synthetic construct
  misc_feature 1..20: note = C9Orf72 CTCN PAM targeting sequence
  source 1..20: mol_type = other RNA
cgcctgtaatccttgcactt

SEQ ID NO: 18005 - RNA, 20 nt, synthetic construct
  misc_feature 1..20: note = C9Orf72 CTCN PAM targeting sequence
  source 1..20: mol_type = other RNA
gagttttatgggaaatcaga

SEQ ID NO: 18006 - RNA, 20 nt, synthetic construct
  misc_feature 1..20: note = C9Orf72 CTCN PAM targeting sequence
  source 1..20: mol_type = other RNA
gagttcccaggtttttgaaa

SEQ ID NO: 18007 - RNA, 20 nt, synthetic construct
  misc_feature 1..20: note = C9Orf72 CTCN PAM targeting sequence
  source 1..20: mol_type = other RNA
actggatcaatagcatttta

SEQ ID NO: 18008 - RNA, 20 nt, synthetic construct
  misc_feature 1..20: note = C9Orf72 CTCN PAM targeting sequence
  source 1..20: mol_type = other RNA
tttcttccctccactggatc

SEQ ID NO: 18009 - RNA, 20 nt, synthetic construct
  misc_feature 1..20: note = C9Orf72 CTCN PAM targeting sequence
  source 1..20: mol_type = other RNA
ttcaaaccactgaaacatga

SEQ ID NO: 18010 - RNA, 20 nt, synthetic construct
  misc_feature 1..20: note = C9Orf72 CTCN PAM targeting sequence
  source 1..20: mol_type = other RNA
tcagccaaatgataaggttg

SEQ ID NO: 18011 - RNA, 20 nt, synthetic construct
  misc_feature 1..20: note = C9Orf72 CTCN PAM targeting sequence
  source 1..20: mol_type = other RNA
atgtgctttatgtttggatt

SEQ ID NO: 18012 - RNA, 20 nt, synthetic construct
  misc_feature 1..20: note = C9Orf72 CTCN PAM targeting sequence
  source 1..20: mol_type = other RNA
aaactcataataatgtctgg

SEQ ID NO: 18013 - RNA, 20 nt, synthetic construct
  misc_feature 1..20: note = C9Orf72 CTCN PAM targeting sequence
  source 1..20: mol_type = other RNA
taataatgtctggatggtct

SEQ ID NO: 18014 - RNA, 20 nt, synthetic construct
  misc_feature 1..20: note = C9Orf72 CTCN PAM targeting sequence
  source 1..20: mol_type = other RNA
tttgggggcttactggatac

SEQ ID NO: 18015 - RNA, 20 nt, synthetic construct
  misc_feature 1..20: note = C9Orf72 CTCN PAM targeting sequence
  source 1..20: mol_type = other RNA
gtgcctaaaagaatggagag

SEQ ID NO: 18016 - RNA, 20 nt, synthetic construct
  misc_feature 1..20: note = C9Orf72 CTCN PAM targeting sequence
  source 1..20: mol_type = other RNA
attcttttaggcacagagca

SEQ ID NO: 18017 - RNA, 20 nt, synthetic construct
  misc_feature 1..20: note = C9Orf72 CTCN PAM targeting sequence
  source 1..20: mol_type = other RNA
ccattcttttaggcacagag

SEQ ID NO: 18018 - RNA, 20 nt, synthetic construct
  misc_feature 1..20: note = C9Orf72 CTCN PAM targeting sequence
  source 1..20: mol_type = other RNA
tctccattcttttaggcaca

SEQ ID NO: 18019 - RNA, 20 nt, synthetic construct
  misc_feature 1..20: note = C9Orf72 CTCN PAM targeting sequence
  source 1..20: mol_type = other RNA
tcttcctcctctccattctt

SEQ ID NO: 18020 - RNA, 20 nt, synthetic construct
  misc_feature 1..20: note = C9Orf72 CTCN PAM targeting sequence
  source 1..20: mol_type = other RNA
ttgagccagttcctggaatg

SEQ ID NO: 18021 - RNA, 20 nt, synthetic construct
  misc_feature 1..20: note = C9Orf72 CTCN PAM targeting sequence
  source 1..20: mol_type = other RNA
aagagtaacttaaggtgaat

SEQ ID NO: 18022 - RNA, 20 nt, synthetic construct
  misc_feature 1..20: note = C9Orf72 CTCN PAM targeting sequence
  source 1..20: mol_type = other RNA
tagtaaggtctatggggaag

SEQ ID NO: 18023 - RNA, 20 nt, synthetic construct
  misc_feature 1..20: note = C9Orf72 CTCN PAM targeting sequence
  source 1..20: mol_type = other RNA
aatgttcagtgtggcttcca

SEQ ID NO: 18024 - RNA, 20 nt, synthetic construct
  misc_feature 1..20: note = C9Orf72 CTCN PAM targeting sequence
  source 1..20: mol_type = other RNA
gttgcatctcaacctctgcc

SEQ ID NO: 18025 - RNA, 20 nt, synthetic construct
  misc_feature 1..20: note = C9Orf72 CTCN PAM targeting sequence
  source 1..20: mol_type = other RNA
acctctgcctctacaccatt

SEQ ID NO: 18026 - RNA, 20 nt, synthetic construct
  misc_feature 1..20: note = C9Orf72 CTCN PAM targeting sequence
  source 1..20: mol_type = other RNA
gcctctacaccattgcccgt

SEQ ID NO: 18027 - RNA, 20 nt, synthetic construct
  misc_feature 1..20: note = C9Orf72 CTCN PAM targeting sequence
  source 1..20: mol_type = other RNA
acaccattgcccgtgctggt

SEQ ID NO: 18028 - RNA, 20 nt, synthetic construct
  misc_feature 1..20: note = C9Orf72 CTCN PAM targeting sequence
  source 1..20: mol_type = other RNA
ccatctgtacttcccaccaa

SEQ ID NO: 18029 - RNA, 20 nt, synthetic construct
  misc_feature 1..20: note = C9Orf72 CTCN PAM targeting sequence
  source 1..20: mol_type = other RNA
aaaagttgcttgaggttcct

SEQ ID NO: 18030 - RNA, 20 nt, synthetic construct
  misc_feature 1..20: note = C9Orf72 CTCN PAM targeting sequence
  source 1..20: mol_type = other RNA
agcaacttttagagaatgct

SEQ ID NO: 18031 - RNA, 20 nt, synthetic construct
  misc_feature 1..20: note = C9Orf72 CTCN PAM targeting sequence
  source 1..20: mol_type = other RNA
gcaaaaatttgtgtaatgag

SEQ ID NO: 18032 - RNA, 20 nt, synthetic construct
  misc_feature 1..20: note = C9Orf72 CTCN PAM targeting sequence
  source 1..20: mol_type = other RNA
ttacacaaatttttgcagag

SEQ ID NO: 18033 - RNA, 20 nt, synthetic construct
  misc_feature 1..20: note = C9Orf72 CTCN PAM targeting sequence
  source 1..20: mol_type = other RNA
agaagcagccttatcaggcc

SEQ ID NO: 18034 - RNA, 20 nt, synthetic construct
  misc_feature 1..20: note = C9Orf72 CTCN PAM targeting sequence
  source 1..20: mol_type = other RNA
ccagaagcagccttatcagg

SEQ ID NO: 18035 - RNA, 20 nt, synthetic construct
  misc_feature 1..20: note = C9Orf72 CTCN PAM targeting sequence
  source 1..20: mol_type = other RNA
tttcctagagtatcttgcct

SEQ ID NO: 18036 - RNA, 20 nt, synthetic construct
  misc_feature 1..20: note = C9Orf72 CTCN PAM targeting sequence
  source 1..20: mol_type = other RNA
aggaaaagagtccagtcctt

SEQ ID NO: 18037 - RNA, 20 nt, synthetic construct
  misc_feature 1..20: note = C9Orf72 CTCN PAM targeting sequence
  source 1..20: mol_type = other RNA
tgctaacctgtcttatccac

SEQ ID NO: 18038 - RNA, 20 nt, synthetic construct
  misc_feature 1..20: note = C9Orf72 CTCN PAM targeting sequence
  source 1..20: mol_type = other RNA
taaagatattaaactgcaag

SEQ ID NO: 18039 - RNA, 20 nt, synthetic construct
  misc_feature 1..20: note = C9Orf72 CTCN PAM targeting sequence
  source 1..20: mol_type = other RNA
aatatgtatgtgcacctctt

SEQ ID NO: 18040 - RNA, 20 nt, synthetic construct
  misc_feature 1..20: note = C9Orf72 CTCN PAM targeting sequence
  source 1..20: mol_type = other RNA
tttaagccctcaaatatgta

SEQ ID NO: 18041 - RNA, 20 nt, synthetic construct
  misc_feature 1..20: note = C9Orf72 CTCN PAM targeting sequence
  source 1..20: mol_type = other RNA
ttgtattttggaaacaatta

SEQ ID NO: 18042 - RNA, 20 nt, synthetic construct
  misc_feature 1..20: note = C9Orf72 CTCN PAM targeting sequence
  source 1..20: mol_type = other RNA
aaaaaaaaaaaaaaaaaaaa

SEQ ID NO: 18043 - RNA, 20 nt, synthetic construct
  misc_feature 1..20: note = C9Orf72 CTCN PAM targeting sequence
  source 1..20: mol_type = other RNA
gtctcaaaaaaaaaaaaaaa

SEQ ID NO: 18044 - RNA, 20 nt, synthetic construct
  misc_feature 1..20: note = C9Orf72 CTCN PAM targeting sequence
  source 1..20: mol_type = other RNA
gtcgcccaggctggagtgta

SEQ ID NO: 18045 - RNA, 20 nt, synthetic construct
  misc_feature 1..20: note = C9Orf72 CTCN PAM targeting sequence
  source 1..20: mol_type = other RNA
agcctgggcgacagagcaag

SEQ ID NO: 18046 - RNA, 20 nt, synthetic construct
  misc_feature 1..20: note = C9Orf72 CTCN PAM targeting sequence
  source 1..20: mol_type = other RNA
ctgcaagctccgcctcccgg

SEQ ID NO: 18047 - RNA, 20 nt, synthetic construct
  misc_feature 1..20: note = C9Orf72 CTCN PAM targeting sequence
  source 1..20: mol_type = other RNA
gcctcccgggttcacgccat

SEQ ID NO: 18048 - RNA, 20 nt, synthetic construct
  misc_feature 1..20: note = C9Orf72 CTCN PAM targeting sequence
  source 1..20: mol_type = other RNA
cgggttcacgccattctccc

SEQ ID NO: 18049 - RNA, 20 nt, synthetic construct
  misc_feature 1..20: note = C9Orf72 CTCN PAM targeting sequence
  source 1..20: mol_type = other RNA
cgcctcagcctcccgagtag

SEQ ID NO: 18050 - RNA, 20 nt, synthetic construct
  misc_feature 1..20: note = C9Orf72 CTCN PAM targeting sequence
  source 1..20: mol_type = other RNA
gcctcccgagtagctgggac

SEQ ID NO: 18051 - RNA, 20 nt, synthetic construct
  misc_feature 1..20: note = C9Orf72 CTCN PAM targeting sequence
  source 1..20: mol_type = other RNA
cgagtagctgggactacagg

SEQ ID NO: 18052 - RNA, 20 nt, synthetic construct
  misc_feature 1..20: note = C9Orf72 CTCN PAM targeting sequence
  source 1..20: mol_type = other RNA
ggaggctgaggcgggagaat

SEQ ID NO: 18053 - RNA, 20 nt, synthetic construct
  misc_feature 1..20: note = C9Orf72 CTCN PAM targeting sequence
  source 1..20: mol_type = other RNA
tgactttgtgatccgcccgc

SEQ ID NO: 18054 - RNA, 20 nt, synthetic construct
  misc_feature 1..20: note = C9Orf72 CTCN PAM targeting sequence
  source 1..20: mol_type = other RNA
gcctcccaaagtgctgggat

SEQ ID NO: 18055 - RNA, 20 nt, synthetic construct
  misc_feature 1..20: note = C9Orf72 CTCN PAM targeting sequence
  source 1..20: mol_type = other RNA
caaagtgctgggattacagg

SEQ ID NO: 18056 - RNA, 20 nt, synthetic construct
  misc_feature 1..20: note = C9Orf72 CTCN PAM targeting sequence
  source 1..20: mol_type = other RNA
cgcctgtaatcccagcactt

SEQ ID NO: 18057 - RNA, 20 nt, synthetic construct
  misc_feature 1..20: note = C9Orf72 CTCN PAM targeting sequence
  source 1..20: mol_type = other RNA
tgagaaaacagagctaatca

SEQ ID NO: 18058 - RNA, 20 nt, synthetic construct
  misc_feature 1..20: note = C9Orf72 CTCN PAM targeting sequence
  source 1..20: mol_type = other RNA
ggagctatgcagtcaagaat

SEQ ID NO: 18059 - RNA, 20 nt, synthetic construct
  misc_feature 1..20: note = C9Orf72 CTCN PAM targeting sequence
  source 1..20: mol_type = other RNA
gttttctcaggagctatgca

SEQ ID NO: 18060 - RNA, 20 nt, synthetic construct
  misc_feature 1..20: note = C9Orf72 CTCN PAM targeting sequence
  source 1..20: mol_type = other RNA
cattaaatataatctgtgca

SEQ ID NO: 18061 - RNA, 20 nt, synthetic construct
  misc_feature 1..20: note = C9Orf72 CTCN PAM targeting sequence
  source 1..20: mol_type = other RNA
tgggcagaagaggaactaag

SEQ ID NO: 18062 - RNA, 20 nt, synthetic construct
  misc_feature 1..20: note = C9Orf72 CTCN PAM targeting sequence
  source 1..20: mol_type = other RNA
tctgcccacgagcataccaa

SEQ ID NO: 18063 - RNA, 20 nt, synthetic construct
  misc_feature 1..20: note = C9Orf72 CTCN PAM targeting sequence
  source 1..20: mol_type = other RNA
gaaaatcttaaaagacctgg

SEQ ID NO: 18064 - RNA, 20 nt, synthetic construct
  misc_feature 1..20: note = C9Orf72 CTCN PAM targeting sequence
  source 1..20: mol_type = other RNA
tgctgtacatgggaccaggt

SEQ ID NO: 18065 - RNA, 20 nt, synthetic construct
  misc_feature 1..20: note = C9Orf72 CTCN PAM targeting sequence
  source 1..20: mol_type = other RNA
ttgcaccctcctgctgtaca

SEQ ID NO: 18066 - RNA, 20 nt, synthetic construct
  misc_feature 1..20: note = C9Orf72 CTCN PAM targeting sequence
  source 1..20: mol_type = other RNA
ctttgcaccctcctgctgta

SEQ ID NO: 18067 - RNA, 20 nt, synthetic construct
  misc_feature 1..20: note = C9Orf72 CTCN PAM targeting sequence
  source 1..20: mol_type = other RNA
gccatttccccctacgtcgc

SEQ ID NO: 18068 - RNA, 20 nt, synthetic construct
  misc_feature 1..20: note = C9Orf72 CTCN PAM targeting sequence
  source 1..20: mol_type = other RNA
gctgtgacacaccctctgcc

SEQ ID NO: 18069 - RNA, 20 nt, synthetic construct
  misc_feature 1..20: note = C9Orf72 CTCN PAM targeting sequence
  source 1..20: mol_type = other RNA
cccttcatgaatgaaatctt

SEQ ID NO: 18070 - RNA, 20 nt, synthetic construct
  misc_feature 1..20: note = C9Orf72 CTCN PAM targeting sequence
  source 1..20: mol_type = other RNA
ggaaaatgctgctttccact

SEQ ID NO: 18071 - RNA, 20 nt, synthetic construct
  misc_feature 1..20: note = C9Orf72 CTCN PAM targeting sequence
  source 1..20: mol_type = other RNA
aacccttatcccctacaaga

SEQ ID NO: 18072 - RNA, 20 nt, synthetic construct
  misc_feature 1..20: note = C9Orf72 CTCN PAM targeting sequence
  source 1..20: mol_type = other RNA
gtcacctggactcaaaccct

SEQ ID NO: 18073 - RNA, 20 nt, synthetic construct
  misc_feature 1..20: note = C9Orf72 CTCN PAM targeting sequence
  source 1..20: mol_type = other RNA
ttagtggctctgtcacctgg

SEQ ID NO: 18074 - RNA, 20 nt, synthetic construct
  misc_feature 1..20: note = C9Orf72 CTCN PAM targeting sequence
  source 1..20: mol_type = other RNA
ccctgccctggcactcctta

SEQ ID NO: 18075 - RNA, 20 nt, synthetic construct
  misc_feature 1..20: note = C9Orf72 CTCN PAM targeting sequence
  source 1..20: mol_type = other RNA
ttatgggccctcaccctgcc

SEQ ID NO: 18076 - RNA, 20 nt, synthetic construct
  misc_feature 1..20: note = C9Orf72 CTCN PAM targeting sequence
  source 1..20: mol_type = other RNA
aagatgcaggaagaacttgg

SEQ ID NO: 18077 - RNA, 20 nt, synthetic construct
  misc_feature 1..20: note = C9Orf72 CTCN PAM targeting sequence
  source 1..20: mol_type = other RNA
cttggggcatccctgcccct

SEQ ID NO: 18078 - RNA, 20 nt, synthetic construct
  misc_feature 1..20: note = C9Orf72 CTCN PAM targeting sequence
  source 1..20: mol_type = other RNA
tctcaaaatgcaggtcctat

SEQ ID NO: 18079 - RNA, 20 nt, synthetic construct
  misc_feature 1..20: note = C9Orf72 CTCN PAM targeting sequence
  source 1..20: mol_type = other RNA
aaatgcaggtcctatcacag

SEQ ID NO: 18080 - RNA, 20 nt, synthetic construct
  misc_feature 1..20: note = C9Orf72 CTCN PAM targeting sequence
  source 1..20: mol_type = other RNA
agacaactgtgataggacct

SEQ ID NO: 18081 - RNA, 20 nt, synthetic construct
  misc_feature 1..20: note = C9Orf72 CTCN PAM targeting sequence
  source 1..20: mol_type = other RNA
gctccagacaactgtgatag

SEQ ID NO: 18082 - RNA, 20 nt, synthetic construct
  misc_feature 1..20: note = C9Orf72 CTCN PAM targeting sequence
  source 1..20: mol_type = other RNA
ccctcagctccagacaactg

SEQ ID NO: 18083 - RNA, 20 nt, synthetic construct
  misc_feature 1..20: note = C9Orf72 CTCN PAM targeting sequence
  source 1..20: mol_type = other RNA
tgatcacttctatgttcaac

SEQ ID NO: 18084 - RNA, 20 nt, synthetic construct
  misc_feature 1..20: note = C9Orf72 CTCN PAM targeting sequence
  source 1..20: mol_type = other RNA
cattcagaggatcccattaa

SEQ ID NO: 18085 - RNA, 20 nt, synthetic construct
  misc_feature 1..20: note = C9Orf72 CTCN PAM targeting sequence
  source 1..20: mol_type = other RNA
gaatgggagcccttagaaag

SEQ ID NO: 18086 - RNA, 20 nt, synthetic construct
  misc_feature 1..20: note = C9Orf72 CTCN PAM targeting sequence
  source 1..20: mol_type = other RNA
gagaaaaacgggaagagata

SEQ ID NO: 18087 - RNA, 20 nt, synthetic construct
  misc_feature 1..20: note = C9Orf72 CTCN PAM targeting sequence
  source 1..20: mol_type = other RNA
gagttaatgggatcctctga

SEQ ID NO: 18088 - RNA, 20 nt, synthetic construct
  misc_feature 1..20: note = C9Orf72 CTCN PAM targeting sequence
  source 1..20: mol_type = other RNA
tcccgtttttctctgagtta

SEQ ID NO: 18089 - RNA, 20 nt, synthetic construct
  misc_feature 1..20: note = C9Orf72 CTCN PAM targeting sequence
  source 1..20: mol_type = other RNA
cagcatttccacagcagccc

SEQ ID NO: 18090 - RNA, 20 nt, synthetic construct
  misc_feature 1..20: note = C9Orf72 CTCN PAM targeting sequence
  source 1..20: mol_type = other RNA
accccctacatggcagacag

SEQ ID NO: 18091 - RNA, 20 nt, synthetic construct
  misc_feature 1..20: note = C9Orf72 CTCN PAM targeting sequence
  source 1..20: mol_type = other RNA
ggcgggagtaagaagccatg

SEQ ID NO: 18092 - RNA, 20 nt, synthetic construct
  misc_feature 1..20: note = C9Orf72 CTCN PAM targeting sequence
  source 1..20: mol_type = other RNA
cgcctgagttttttgttttg

SEQ ID NO: 18093 - RNA, 20 nt, synthetic construct
  misc_feature 1..20: note = C9Orf72 CTCN PAM targeting sequence
  source 1..20: mol_type = other RNA
ctgtgcaaaactgatgagtg

SEQ ID NO: 18094 - RNA, 20 nt, synthetic construct
  misc_feature 1..20: note = C9Orf72 CTCN PAM targeting sequence
  source 1..20: mol_type = other RNA
tcagttttgcacagggagaa

SEQ ID NO: 18095 - RNA, 20 nt, synthetic construct
  misc_feature 1..20: note = C9Orf72 CTCN PAM targeting sequence
  source 1..20: mol_type = other RNA
cactcatcagttttgcacag

SEQ ID NO: 18096 - RNA, 20 nt, synthetic construct
  misc_feature 1..20: note = C9Orf72 CTCN PAM targeting sequence
  source 1..20: mol_type = other RNA
tcttactgcctcccactcat

SEQ ID NO: 18097 - RNA, 20 nt, synthetic construct
  misc_feature 1..20: note = C9Orf72 CTCN PAM targeting sequence
  source 1..20: mol_type = other RNA
cttcttactgcctcccactc

SEQ ID NO: 18098 - RNA, 20 nt, synthetic construct
  misc_feature 1..20: note = C9Orf72 CTCN PAM targeting sequence
  source 1..20: mol_type = other RNA
aaggttgaaggctaacaaaa

SEQ ID NO: 18099 - RNA, 20 nt, synthetic construct
  misc_feature 1..20: note = C9Orf72 CTCN PAM targeting sequence
  source 1..20: mol_type = other RNA
tgagccttgcacctgccctg

SEQ ID NO: 18100 - RNA, 20 nt, synthetic construct
  misc_feature 1..20: note = C9Orf72 CTCN PAM targeting sequence
  source 1..20: mol_type = other RNA
ggaggtgggcagacatgaaa

SEQ ID NO: 18101 - RNA, 20 nt, synthetic construct
  misc_feature 1..20: note = C9Orf72 CTCN PAM targeting sequence
  source 1..20: mol_type = other RNA
tctaccctgccctgagaact

SEQ ID NO: 18102 - RNA, 20 nt, synthetic construct
  misc_feature 1..20: note = C9Orf72 CTCN PAM targeting sequence
  source 1..20: mol_type = other RNA
accctgccctgagaactcag

SEQ ID NO: 18103 - RNA, 20 nt, synthetic construct
  misc_feature 1..20: note = C9Orf72 CTCN PAM targeting sequence
  source 1..20: mol_type = other RNA
gggcagggtagaggaggccg

SEQ ID NO: 18104 - RNA, 20 nt, synthetic construct
  misc_feature 1..20: note = C9Orf72 CTCN PAM targeting sequence
  source 1..20: mol_type = other RNA
gcgttccatgcatcctcagg

SEQ ID NO: 18105 - RNA, 20 nt, synthetic construct
  misc_feature 1..20: note = C9Orf72 CTCN PAM targeting sequence
  source 1..20: mol_type = other RNA
ggctttttctgcaggctgtc

SEQ ID NO: 18106 - RNA, 20 nt, synthetic construct
  misc_feature 1..20: note = C9Orf72 CTCN PAM targeting sequence
  source 1..20: mol_type = other RNA
tgcctgggtttgacagcctg

SEQ ID NO: 18107 - RNA, 20 nt, synthetic construct
  misc_feature 1..20: note = C9Orf72 CTCN PAM targeting sequence
  source 1..20: mol_type = other RNA
ccagggtaccagctagtaaa

SEQ ID NO: 18108 - RNA, 20 nt, synthetic construct
  misc_feature 1..20: note = C9Orf72 CTCN PAM targeting sequence
  source 1..20: mol_type = other RNA
acctgactgtgtggatgtag

SEQ ID NO: 18109 - RNA, 20 nt, synthetic construct
  misc_feature 1..20: note = C9Orf72 CTCN PAM targeting sequence
  source 1..20: mol_type = other RNA
gggacatggagtacagtgac

SEQ ID NO: 18110 - RNA, 20 nt, synthetic construct
  misc_feature 1..20: note = C9Orf72 CTCN PAM targeting sequence
  source 1..20: mol_type = other RNA
atgtcccagagtccccttct

SEQ ID NO: 18111 - RNA, 20 nt, synthetic construct
  misc_feature 1..20: note = C9Orf72 CTCN PAM targeting sequence
  source 1..20: mol_type = other RNA
gttaatggaaacttgactcc

SEQ ID NO: 18112 - RNA, 20 nt, synthetic construct
  misc_feature 1..20: note = C9Orf72 CTCN PAM targeting sequence
  source 1..20: mol_type = other RNA
cagcctttaaccctgacaac

SEQ ID NO: 18113 - RNA, 20 nt, synthetic construct
  misc_feature 1..20: note = C9Orf72 CTCN PAM targeting sequence
  source 1..20: mol_type = other RNA
aacttggatccgtggtctgt

SEQ ID NO: 18114 - RNA, 20 nt, synthetic construct
  misc_feature 1..20: note = C9Orf72 CTCN PAM targeting sequence
  source 1..20: mol_type = other RNA
agggcatccagtccatatat

SEQ ID NO: 18115 - RNA, 20 nt, synthetic construct
  misc_feature 1..20: note = C9Orf72 CTCN PAM targeting sequence
  source 1..20: mol_type = other RNA
tttaatcctcgaaacaaccc

SEQ ID NO: 18116 - RNA, 20 nt, synthetic construct
  misc_feature 1..20: note = C9Orf72 CTCN PAM targeting sequence
  source 1..20: mol_type = other RNA
aaacaacccatgaggtaagt

SEQ ID NO: 18117 - RNA, 20 nt, synthetic construct
  misc_feature 1..20: note = C9Orf72 CTCN PAM targeting sequence
  source 1..20: mol_type = other RNA
tgggttgtttcgaggattaa

SEQ ID NO: 18118 - RNA, 20 nt, synthetic construct
  misc_feature 1..20: note = C9Orf72 CTCN PAM targeting sequence
  source 1..20: mol_type = other RNA
gcttctttatctgttaagat

SEQ ID NO: 18119 - RNA, 20 nt, synthetic construct
  misc_feature 1..20: note = C9Orf72 CTCN PAM targeting sequence
  source 1..20: mol_type = other RNA
acagtccctaccttgccagg

SEQ ID NO: 18120 - RNA, 20 nt, synthetic construct
  misc_feature 1..20: note = C9Orf72 CTCN PAM targeting sequence
  source 1..20: mol_type = other RNA
ttttacacaggaaggaaatg

SEQ ID NO: 18121 - RNA, 20 nt, synthetic construct
  misc_feature 1..20: note = C9Orf72 CTCN PAM targeting sequence
  source 1..20: mol_type = other RNA
gtgaacccatttccttcctg

SEQ ID NO: 18122 - RNA, 20 nt, synthetic construct
  misc_feature 1..20: note = C9Orf72 CTCN PAM targeting sequence
  source 1..20: mol_type = other RNA
gctggctctaaagcctattt

SEQ ID NO: 18123 - RNA, 20 nt, synthetic construct
  misc_feature 1..20: note = C9Orf72 CTCN PAM targeting sequence
  source 1..20: mol_type = other RNA
aaagcctatttcctttctag

SEQ ID NO: 18124 - RNA, 20 nt, synthetic construct
  misc_feature 1..20: note = C9Orf72 CTCN PAM targeting sequence
  source 1..20: mol_type = other RNA
aggcctctccaacaccacta

SEQ ID NO: 18125 - RNA, 20 nt, synthetic construct
  misc_feature 1..20: note = C9Orf72 CTCN PAM targeting sequence
  source 1..20: mol_type = other RNA
ccaacaccactatttctgtt

SEQ ID NO: 18126 - RNA, 20 nt, synthetic construct
  misc_feature 1..20: note = C9Orf72 CTCN PAM targeting sequence
  source 1..20: mol_type = other RNA
aacaccactatttctgttaa

SEQ ID NO: 18127 - RNA, 20 nt, synthetic construct
  misc_feature 1..20: note = C9Orf72 CTCN PAM targeting sequence
  source 1..20: mol_type = other RNA
taacagaaatagtggtgttg

SEQ ID NO: 18128 - RNA, 20 nt, synthetic construct
  misc_feature 1..20: note = C9Orf72 CTCN PAM targeting sequence
  source 1..20: mol_type = other RNA
caatcacaaagccccaaatg

SEQ ID NO: 18129 - RNA, 20 nt, synthetic construct
  misc_feature 1..20: note = C9Orf72 CTCN PAM targeting sequence
  source 1..20: mol_type = other RNA
ctgattctgtctctggaatg

SEQ ID NO: 18130 - RNA, 20 nt, synthetic construct
  misc_feature 1..20: note = C9Orf72 CTCN PAM targeting sequence
  source 1..20: mol_type = other RNA
ggaatgtctccaatattagc

SEQ ID NO: 18131 - RNA, 20 nt, synthetic construct
  misc_feature 1..20: note = C9Orf72 CTCN PAM targeting sequence
  source 1..20: mol_type = other RNA
aatattagcccctttctttg

SEQ ID NO: 18132 - RNA, 20 nt, synthetic construct
  misc_feature 1..20: note = C9Orf72 CTCN PAM targeting sequence
  source 1..20: mol_type = other RNA
aatggctcctgctttacatt

SEQ ID NO: 18133 - RNA, 20 nt, synthetic construct
  misc_feature 1..20: note = C9Orf72 CTCN PAM targeting sequence
  source 1..20: mol_type = other RNA
tgctttacatttcactttca

SEQ ID NO: 18134 - RNA, 20 nt, synthetic construct
  misc_feature 1..20: note = C9Orf72 CTCN PAM targeting sequence
  source 1..20: mol_type = other RNA
aactgattttacatcctaca

SEQ ID NO: 18135 - RNA, 20 nt, synthetic construct
  misc_feature 1..20: note = C9Orf72 CTCN PAM targeting sequence
  source 1..20: mol_type = other RNA
tccctctctaccctcatgga

SEQ ID NO: 18136 - RNA, 20 nt, synthetic construct
  misc_feature 1..20: note = C9Orf72 CTCN PAM targeting sequence
  source 1..20: mol_type = other RNA
ctaccctcatggaaaattac

SEQ ID NO: 18137 - RNA, 20 nt, synthetic construct
  misc_feature 1..20: note = C9Orf72 CTCN PAM targeting sequence
  source 1..20: mol_type = other RNA
accctcatggaaaattactc

SEQ ID NO: 18138 - RNA, 20 nt, synthetic construct
  misc_feature 1..20: note = C9Orf72 CTCN PAM targeting sequence
  source 1..20: mol_type = other RNA
tggaaaattactcttcttta

SEQ ID NO: 18139 - RNA, 20 nt, synthetic construct
  misc_feature 1..20: note = C9Orf72 CTCN PAM targeting sequence
  source 1..20: mol_type = other RNA
tctttaaaacacagctctac

SEQ ID NO: 18140 - RNA, 20 nt, synthetic construct
  misc_feature 1..20: note = C9Orf72 CTCN PAM targeting sequence
  source 1..20: mol_type = other RNA
acaaaatgtcaacagcagaa

SEQ ID NO: 18141 - RNA, 20 nt, synthetic construct
  misc_feature 1..20: note = C9Orf72 CTCN PAM targeting sequence
  source 1..20: mol_type = other RNA
tctgtgtttattgagttaaa

SEQ ID NO: 18142 - RNA, 20 nt, synthetic construct
  misc_feature 1..20: note = C9Orf72 CTCN PAM targeting sequence
  source 1..20: mol_type = other RNA
ataaacacagaagagaacaa

SEQ ID NO: 18143 - RNA, 20 nt, synthetic construct
  misc_feature 1..20: note = C9Orf72 CTCN PAM targeting sequence
  source 1..20: mol_type = other RNA
atgcctttaactcaataaac

SEQ ID NO: 18144 - RNA, 20 nt, synthetic construct
  misc_feature 1..20: note = C9Orf72 CTCN PAM targeting sequence
  source 1..20: mol_type = other RNA
ccaacactattgctaaccac

SEQ ID NO: 18145 - RNA, 20 nt, synthetic construct
  misc_feature 1..20: note = C9Orf72 CTCN PAM targeting sequence
  source 1..20: mol_type = other RNA
ctgagctgaactattcaaga

SEQ ID NO: 18146 - RNA, 20 nt, synthetic construct
  misc_feature 1..20: note = C9Orf72 CTCN PAM targeting sequence
  source 1..20: mol_type = other RNA
gtgagtttgcacttatgtgg

SEQ ID NO: 18147 - RNA, 20 nt, synthetic construct
  misc_feature 1..20: note = C9Orf72 CTCN PAM targeting sequence
  source 1..20: mol_type = other RNA
ttgtaaaaagtcttgaatag

SEQ ID NO: 18148 - RNA, 20 nt, synthetic construct
  misc_feature 1..20: note = C9Orf72 CTCN PAM targeting sequence
  source 1..20: mol_type = other RNA
ctttgtaaaaagtcttgaat

SEQ ID NO: 18149 - RNA, 20 nt, synthetic construct
  misc_feature 1..20: note = C9Orf72 CTCN PAM targeting sequence
  source 1..20: mol_type = other RNA
agaaatattgattgaacaaa

SEQ ID NO: 18150 - RNA, 20 nt, synthetic construct
  misc_feature 1..20: note = C9Orf72 CTCN PAM targeting sequence
  source 1..20: mol_type = other RNA
tctcttagtggagcttacag

SEQ ID NO: 18151 - RNA, 20 nt, synthetic construct
  misc_feature 1..20: note = C9Orf72 CTCN PAM targeting sequence
  source 1..20: mol_type = other RNA
tagtggagcttacagtctgt

SEQ ID NO: 18152 - RNA, 20 nt, synthetic construct
  misc_feature 1..20: note = C9Orf72 CTCN PAM targeting sequence
  source 1..20: mol_type = other RNA
actaagagaagagttatatc

SEQ ID NO: 18153 - RNA, 20 nt, synthetic construct
  misc_feature 1..20: note = C9Orf72 CTCN PAM targeting sequence
  source 1..20: mol_type = other RNA
cccaacagactgtaagctcc

SEQ ID NO: 18154 - RNA, 20 nt, synthetic construct
  misc_feature 1..20: note = C9Orf72 CTCN PAM targeting sequence
  source 1..20: mol_type = other RNA
tttcattcttggcacacagc

SEQ ID NO: 18155 - RNA, 20 nt, synthetic construct
  misc_feature 1..20: note = C9Orf72 CTCN PAM targeting sequence
  source 1..20: mol_type = other RNA
tgcccgttgtcctgtcttgt

SEQ ID NO: 18156 - RNA, 20 nt, synthetic construct
  misc_feature 1..20: note = C9Orf72 CTCN PAM targeting sequence
  source 1..20: mol_type = other RNA
ttgatgaagatacttgtgca

SEQ ID NO: 18157 - RNA, 20 nt, synthetic construct
  misc_feature 1..20: note = C9Orf72 CTCN PAM targeting sequence
  source 1..20: mol_type = other RNA
gtgcacaagtatcttcatca

SEQ ID NO: 18158 - RNA, 20 nt, synthetic construct
  misc_feature 1..20: note = C9Orf72 CTCN PAM targeting sequence
  source 1..20: mol_type = other RNA
ttgacttgcttctaatactg

SEQ ID NO: 18159 - RNA, 20 nt, synthetic construct
  misc_feature 1..20: note = C9Orf72 CTCN PAM targeting sequence
  source 1..20: mol_type = other RNA
tgcgttggaagttcttcata

SEQ ID NO: 18160 - RNA, 20 nt, synthetic construct
  misc_feature 1..20: note = C9Orf72 CTCN PAM targeting sequence
  source 1..20: mol_type = other RNA
cttaccggtcctcctgcgtt

SEQ ID NO: 18161 - RNA, 20 nt, synthetic construct
  misc_feature 1..20: note = C9Orf72 CTCN PAM targeting sequence
  source 1..20: mol_type = other RNA
ggctcaaatttgaagcaccc

SEQ ID NO: 18162 - RNA, 20 nt, synthetic construct
  misc_feature 1..20: note = C9Orf72 CTCN PAM targeting sequence
  source 1..20: mol_type = other RNA
aatttgaagcacccttcaaa

SEQ ID NO: 18163 - RNA, 20 nt, synthetic construct
  misc_feature 1..20: note = C9Orf72 CTCN PAM targeting sequence
  source 1..20: mol_type = other RNA
ataatgctttgaagggtgct

SEQ ID NO: 18164 - RNA, 20 nt, synthetic construct
  misc_feature 1..20: note = C9Orf72 CTCN PAM targeting sequence
  source 1..20: mol_type = other RNA
agacacaggaagttattcta

SEQ ID NO: 18165 - RNA, 20 nt, synthetic construct
  misc_feature 1..20: note = C9Orf72 CTCN PAM targeting sequence
  source 1..20: mol_type = other RNA
ggccttctagagatgagaag

SEQ ID NO: 18166 - RNA, 20 nt, synthetic construct
  misc_feature 1..20: note = C9Orf72 CTCN PAM targeting sequence
  source 1..20: mol_type = other RNA
agaaggccagagctaactaa

SEQ ID NO: 18167 - RNA, 20 nt, synthetic construct
  misc_feature 1..20: note = C9Orf72 CTCN PAM targeting sequence
  source 1..20: mol_type = other RNA
tctctagaaggccagagcta

SEQ ID NO: 18168 - RNA, 20 nt, synthetic construct
  misc_feature 1..20: note = C9Orf72 CTCN PAM targeting sequence
  source 1..20: mol_type = other RNA
ccacagtcacactagcctgg

SEQ ID NO: 18169 - RNA, 20 nt, synthetic construct
  misc_feature 1..20: note = C9Orf72 CTCN PAM targeting sequence
  source 1..20: mol_type = other RNA
tattttctttattcccatta

SEQ ID NO: 18170 - RNA, 20 nt, synthetic construct
  misc_feature 1..20: note = C9Orf72 CTCN PAM targeting sequence
  source 1..20: mol_type = other RNA
tgtttagattcatatgaacc

SEQ ID NO: 18171 - RNA, 20 nt, synthetic construct
  misc_feature 1..20: note = C9Orf72 CTCN PAM targeting sequence
  source 1..20: mol_type = other RNA
aggcagcttaagaatgctta

SEQ ID NO: 18172 - RNA, 20 nt, synthetic construct
  misc_feature 1..20: note = C9Orf72 CTCN PAM targeting sequence
  source 1..20: mol_type = other RNA
cgcttgtaatgccagcactt

SEQ ID NO: 18173 - RNA, 20 nt, synthetic construct
  misc_feature 1..20: note = C9Orf72 CTCN PAM targeting sequence
  source 1..20: mol_type = other RNA
caaagtgctggcattacaag

SEQ ID NO: 18174 - RNA, 20 nt, synthetic construct
  misc_feature 1..20: note = C9Orf72 CTCN PAM targeting sequence
  source 1..20: mol_type = other RNA
gcctcccaaagtgctggcat

SEQ ID NO: 18175 - RNA, 20 nt, synthetic construct
  misc_feature 1..20: note = C9Orf72 CTCN PAM targeting sequence
  source 1..20: mol_type = other RNA
agtgatccatctgcctcagc

SEQ ID NO: 18176 - RNA, 20 nt, synthetic construct
  misc_feature 1..20: note = C9Orf72 CTCN PAM targeting sequence
  source 1..20: mol_type = other RNA
cctctactaaaaatacaaaa

SEQ ID NO: 18177 - RNA, 20 nt, synthetic construct
  misc_feature 1..20: note = C9Orf72 CTCN PAM targeting sequence
  source 1..20: mol_type = other RNA
actaaaaatacaaaaattag

SEQ ID NO: 18178 - RNA, 20 nt, synthetic construct
  misc_feature 1..20: note = C9Orf72 CTCN PAM targeting sequence
  source 1..20: mol_type = other RNA
ggaggctgaggaacgagaat

SEQ ID NO: 18179 - RNA, 20 nt, synthetic construct
  misc_feature 1..20: note = C9Orf72 CTCN PAM targeting sequence
  source 1..20: mol_type = other RNA
tgagtagctggaattacaga

SEQ ID NO: 18180 - RNA, 20 nt, synthetic construct
  misc_feature 1..20: note = C9Orf72 CTCN PAM targeting sequence
  source 1..20: mol_type = other RNA
gcctcctgagtagctggaat

SEQ ID NO: 18181 - RNA, 20 nt, synthetic construct
  misc_feature 1..20: note = C9Orf72 CTCN PAM targeting sequence
  source 1..20: mol_type = other RNA
ttcctcagcctcctgagtag

SEQ ID NO: 18182 - RNA, 20 nt, synthetic construct
  misc_feature 1..20: note = C9Orf72 CTCN PAM targeting sequence
  source 1..20: mol_type = other RNA
caggttcaagtgattctcgt

SEQ ID NO: 18183 - RNA, 20 nt, synthetic construct
  misc_feature 1..20: note = C9Orf72 CTCN PAM targeting sequence
  source 1..20: mol_type = other RNA
ctgcaaccttcacctcccag

SEQ ID NO: 18184 - RNA, 20 nt, synthetic construct
  misc_feature 1..20: note = C9Orf72 CTCN PAM targeting sequence
  source 1..20: mol_type = other RNA
ccattgcactccagcctggg

SEQ ID NO: 18185 - RNA, 20 nt, synthetic construct
  misc_feature 1..20: note = C9Orf72 CTCN PAM targeting sequence
  source 1..20: mol_type = other RNA
agcctgggcaacacagtaag

SEQ ID NO: 18186 - RNA, 20 nt, synthetic construct
  misc_feature 1..20: note = C9Orf72 CTCN PAM targeting sequence
  source 1..20: mol_type = other RNA
aaaataaataaataaataaa

SEQ ID NO: 18187 - RNA, 20 nt, synthetic construct
  misc_feature 1..20: note = C9Orf72 CTCN PAM targeting sequence
  source 1..20: mol_type = other RNA
caacgctaagaattatttat

SEQ ID NO: 18188 - RNA, 20 nt, synthetic construct
  misc_feature 1..20: note = C9Orf72 CTCN PAM targeting sequence
  source 1..20: mol_type = other RNA
ataacgtttctataagtcat

SEQ ID NO: 18189 - RNA, 20 nt, synthetic construct
  misc_feature 1..20: note = C9Orf72 CTCN PAM targeting sequence
  source 1..20: mol_type = other RNA
gtctttactatgctagtcag

SEQ ID NO: 18190 - RNA, 20 nt, synthetic construct
  misc_feature 1..20: note = C9Orf72 CTCN PAM targeting sequence
  source 1..20: mol_type = other RNA
gggcaggggatgttctctgt

SEQ ID NO: 18191 - RNA, 20 nt, synthetic construct
  misc_feature 1..20: note = C9Orf72 CTCN PAM targeting sequence
  source 1..20: mol_type = other RNA
ggaggggaggataggcatgt

SEQ ID NO: 18192 - RNA, 20 nt, synthetic construct
  misc_feature 1..20: note = C9Orf72 CTCN PAM targeting sequence
  source 1..20: mol_type = other RNA
agagacggctgattccaggg

SEQ ID NO: 18193 - RNA, 20 nt, synthetic construct
  misc_feature 1..20: note = C9Orf72 CTCN PAM targeting sequence
  source 1..20: mol_type = other RNA
cctccagagacggctgattc

SEQ ID NO: 18194 - RNA, 20 nt, synthetic construct
  misc_feature 1..20: note = C9Orf72 CTCN PAM targeting sequence
  source 1..20: mol_type = other RNA
ttataaaattggggttttct

SEQ ID NO: 18195 - RNA, 20 nt, synthetic construct
  misc_feature 1..20: note = C9Orf72 CTCN PAM targeting sequence
  source 1..20: mol_type = other RNA
gtgttgctcagctgtgaaac

SEQ ID NO: 18196 - RNA, 20 nt, synthetic construct
  misc_feature 1..20: note = C9Orf72 CTCN PAM targeting sequence
  source 1..20: mol_type = other RNA
gctgtgaaacagacccctat

SEQ ID NO: 18197 - RNA, 20 nt, synthetic construct
  misc_feature 1..20: note = C9Orf72 CTCN PAM targeting sequence
  source 1..20: mol_type = other RNA
atgagacctggggggccagg

SEQ ID NO: 18198 - RNA, 20 nt, synthetic construct
  misc_feature 1..20: note = C9Orf72 CTCN PAM targeting sequence
  source 1..20: mol_type = other RNA
tggaggtgatggggatgtgg

SEQ ID NO: 18199 - RNA, 20 nt, synthetic construct
  misc_feature 1..20: note = C9Orf72 CTCN PAM targeting sequence
  source 1..20: mol_type = other RNA
ctggccccccaggtctcatg

SEQ ID NO: 18200 - RNA, 20 nt, synthetic construct
  misc_feature 1..20: note = C9Orf72 CTCN PAM targeting sequence
  source 1..20: mol_type = other RNA
tgctgcctgatgtaccacga

SEQ ID NO: 18201 - RNA, 20 nt, synthetic construct
  misc_feature 1..20: note = C9Orf72 CTCN PAM targeting sequence
  source 1..20: mol_type = other RNA
tggtacatcaggcagcatga

SEQ ID NO: 18202 - RNA, 20 nt, synthetic construct
  misc_feature 1..20: note = C9Orf72 CTCN PAM targeting sequence
  source 1..20: mol_type = other RNA
ttaggggctgcttggccacc

SEQ ID NO: 18203 - RNA, 20 nt, synthetic construct
  misc_feature 1..20: note = C9Orf72 CTCN PAM targeting sequence
  source 1..20: mol_type = other RNA
tgcttctaagggtcaggtgg

SEQ ID NO: 18204 - RNA, 20 nt, synthetic construct
  misc_feature 1..20: note = C9Orf72 CTCN PAM targeting sequence
  source 1..20: mol_type = other RNA
actatttccatagattcttc

SEQ ID NO: 18205 - RNA, 20 nt, synthetic construct
  misc_feature 1..20: note = C9Orf72 CTCN PAM targeting sequence
  source 1..20: mol_type = other RNA
ccctgatgctatggtctctt

SEQ ID NO: 18206 - RNA, 20 nt, synthetic construct
  misc_feature 1..20: note = C9Orf72 CTCN PAM targeting sequence
  source 1..20: mol_type = other RNA
tctctgcttattgattctgc

SEQ ID NO: 18207 - RNA, 20 nt, synthetic construct
  misc_feature 1..20: note = C9Orf72 CTCN PAM targeting sequence
  source 1..20: mol_type = other RNA
gcttattgattctgctatgc

SEQ ID NO: 18208 - RNA, 20 nt, synthetic construct
  misc_feature 1..20: note = C9Orf72 CTCN PAM targeting sequence
  source 1..20: mol_type = other RNA
taacttggtcttgctcatgg

SEQ ID NO: 18209 - RNA, 20 nt, synthetic construct
  misc_feature 1..20: note = C9Orf72 CTCN PAM targeting sequence
  source 1..20: mol_type = other RNA
tggtcttttgtgtgcatcct

SEQ ID NO: 18210 - RNA, 20 nt, synthetic construct
  misc_feature 1..20: note = C9Orf72 CTCN PAM targeting sequence
  source 1..20: mol_type = other RNA
gaagtttggttttggaagta

SEQ ID NO: 18211 - RNA, 20 nt, synthetic construct
  misc_feature 1..20: note = C9Orf72 CTCN PAM targeting sequence
  source 1..20: mol_type = other RNA
cagaagtttggttttggaag

SEQ ID NO: 18212 - RNA, 20 nt, synthetic construct
  misc_feature 1..20: note = C9Orf72 CTCN PAM targeting sequence
  source 1..20: mol_type = other RNA
ccttgagtcaggtgaccatc

SEQ ID NO: 18213 - RNA, 20 nt, synthetic construct
  misc_feature 1..20: note = C9Orf72 CTCN PAM targeting sequence
  source 1..20: mol_type = other RNA
aggggagccagtctgcatac

SEQ ID NO: 18214 - RNA, 20 nt, synthetic construct
  misc_feature 1..20: note = C9Orf72 CTCN PAM targeting sequence
  source 1..20: mol_type = other RNA
aacctgccctactacatttc

SEQ ID NO: 18215 - RNA, 20 nt, synthetic construct
  misc_feature 1..20: note = C9Orf72 CTCN PAM targeting sequence
  source 1..20: mol_type = other RNA
gtgtttcccctgcagctgga

SEQ ID NO: 18216 - RNA, 20 nt, synthetic construct
  misc_feature 1..20: note = C9Orf72 CTCN PAM targeting sequence
  source 1..20: mol_type = other RNA
catggatacaacataatagg

SEQ ID NO: 18217 - RNA, 20 nt, synthetic construct
  misc_feature 1..20: note = C9Orf72 CTCN PAM targeting sequence
  source 1..20: mol_type = other RNA
gcctcccatggatacaacat

SEQ ID NO: 18218 - RNA, 20 nt, synthetic construct
  misc_feature 1..20: note = C9Orf72 CTCN PAM targeting sequence
  source 1..20: mol_type = other RNA
tctgcctcccatggatacaa

SEQ ID NO: 18219 - RNA, 20 nt, synthetic construct
  misc_feature 1..20: note = C9Orf72 CTCN PAM targeting sequence
  source 1..20: mol_type = other RNA
gtattctgcctgatgctgtc

SEQ ID NO: 18220 - RNA, 20 nt, synthetic construct
  misc_feature 1..20: note = C9Orf72 CTCN PAM targeting sequence
  source 1..20: mol_type = other RNA
ctgtattctgcctgatgctg

SEQ ID NO: 18221 - RNA, 20 nt, synthetic construct
  misc_feature 1..20: note = C9Orf72 CTCN PAM targeting sequence
  source 1..20: mol_type = other RNA
aacttgtgaaaactgctgta

SEQ ID NO: 18222 - RNA, 20 nt, synthetic construct
  misc_feature 1..20: note = C9Orf72 CTCN PAM targeting sequence
  source 1..20: mol_type = other RNA
gaactccaaccatatcaccc

SEQ ID NO: 18223 - RNA, 20 nt, synthetic construct
  misc_feature 1..20: note = C9Orf72 CTCN PAM targeting sequence
  source 1..20: mol_type = other RNA
aaccatatcacccaactcag

SEQ ID NO: 18224 - RNA, 20 nt, synthetic construct
  misc_feature 1..20: note = C9Orf72 CTCN PAM targeting sequence
  source 1..20: mol_type = other RNA
gcacaacattcaccccagtg

SEQ ID NO: 18225 - RNA, 20 nt, synthetic construct
  misc_feature 1..20: note = C9Orf72 CTCN PAM targeting sequence
  source 1..20: mol_type = other RNA
gtgtaaaacattatgtttgc

SEQ ID NO: 18226 - RNA, 20 nt, synthetic construct
  misc_feature 1..20: note = C9Orf72 CTCN PAM targeting sequence
  source 1..20: mol_type = other RNA
ctttttatatttatttattt

SEQ ID NO: 18227 - RNA, 20 nt, synthetic construct
  misc_feature 1..20: note = C9Orf72 CTCN PAM targeting sequence
  source 1..20: mol_type = other RNA
ttttatatttatttatttat

SEQ ID NO: 18228 - RNA, 20 nt, synthetic construct
  misc_feature 1..20: note = C9Orf72 CTCN PAM targeting sequence
  source 1..20: mol_type = other RNA
aaaataaataaataaatata

SEQ ID NO: 18229 - RNA, 20 nt, synthetic construct
  misc_feature 1..20: note = C9Orf72 CTCN PAM targeting sequence
  source 1..20: mol_type = other RNA
ctctgttgcccaggctggag

SEQ ID NO: 18230 - RNA, 20 nt, synthetic construct
  misc_feature 1..20: note = C9Orf72 CTCN PAM targeting sequence
  source 1..20: mol_type = other RNA
gttgcccaggctggagtgca

SEQ ID NO: 18231 - RNA, 20 nt, synthetic construct
  misc_feature 1..20: note = C9Orf72 CTCN PAM targeting sequence
  source 1..20: mol_type = other RNA
agcctgggcaacagagcgag

SEQ ID NO: 18232 - RNA, 20 nt, synthetic construct
  misc_feature 1..20: note = C9Orf72 CTCN PAM targeting sequence
  source 1..20: mol_type = other RNA
gcctcccaggttcaaacaat

SEQ ID NO: 18233 - RNA, 20 nt, synthetic construct
  misc_feature 1..20: note = C9Orf72 CTCN PAM targeting sequence
  source 1..20: mol_type = other RNA
caggttcaaacaattctcct

SEQ ID NO: 18234 - RNA, 20 nt, synthetic construct
  misc_feature 1..20: note = C9Orf72 CTCN PAM targeting sequence
  source 1..20: mol_type = other RNA
tgcctcagcctcctgagtag

SEQ ID NO: 18235 - RNA, 20 nt, synthetic construct
  misc_feature 1..20: note = C9Orf72 CTCN PAM targeting sequence
  source 1..20: mol_type = other RNA
gcctcctgagtagctgggat

SEQ ID NO: 18236 - RNA, 20 nt, synthetic construct
  misc_feature 1..20: note = C9Orf72 CTCN PAM targeting sequence
  source 1..20: mol_type = other RNA
tgagtagctgggattacagg

SEQ ID NO: 18237 - RNA, 20 nt, synthetic construct
  misc_feature 1..20: note = C9Orf72 CTCN PAM targeting sequence
  source 1..20: mol_type = other RNA
ggaggctgaggcaggagaat

SEQ ID NO: 18238 - RNA, 20 nt, synthetic construct
  misc_feature 1..20: note = C9Orf72 CTCN PAM targeting sequence
  source 1..20: mol_type = other RNA
gctaacttttgtatttttag

SEQ ID NO: 18239 - RNA, 20 nt, synthetic construct
  misc_feature 1..20: note = C9Orf72 CTCN PAM targeting sequence
  source 1..20: mol_type = other RNA
actaaaaatacaaaagttag

SEQ ID NO: 18240 - RNA, 20 nt, synthetic construct
  misc_feature 1..20: note = C9Orf72 CTCN PAM targeting sequence
  source 1..20: mol_type = other RNA
aactcctgaccttacgtggt

SEQ ID NO: 18241 - RNA, 20 nt, synthetic construct
  misc_feature 1..20: note = C9Orf72 CTCN PAM targeting sequence
  source 1..20: mol_type = other RNA
tgaccttacgtggtctaccc

SEQ ID NO: 18242 - RNA, 20 nt, synthetic construct
  misc_feature 1..20: note = C9Orf72 CTCN PAM targeting sequence
  source 1..20: mol_type = other RNA
gcctgccaaagtgctgggat

SEQ ID NO: 18243 - RNA, 20 nt, synthetic construct
  misc_feature 1..20: note = C9Orf72 CTCN PAM targeting sequence
  source 1..20: mol_type = other RNA
cacctgtaatcccagcactt

SEQ ID NO: 18244 - RNA, 20 nt, synthetic construct
  misc_feature 1..20: note = C9Orf72 CTCN PAM targeting sequence
  source 1..20: mol_type = other RNA
aaaggggtcatggcataccc

SEQ ID NO: 18245 - RNA, 20 nt, synthetic construct
  misc_feature 1..20: note = C9Orf72 CTCN PAM targeting sequence
  source 1..20: mol_type = other RNA
atgggtatgccatgacccct

SEQ ID NO: 18246 - RNA, 20 nt, synthetic construct
  misc_feature 1..20: note = C9Orf72 CTCN PAM targeting sequence
  source 1..20: mol_type = other RNA
tttctgtgctgaccacattc

SEQ ID NO: 18247 - RNA, 20 nt, synthetic construct
  misc_feature 1..20: note = C9Orf72 CTCN PAM targeting sequence
  source 1..20: mol_type = other RNA
gaattgttcctacttattct

SEQ ID NO: 18248 - RNA, 20 nt, synthetic construct
  misc_feature 1..20: note = C9Orf72 CTCN PAM targeting sequence
  source 1..20: mol_type = other RNA
tttagtctgtgtaagttacc

SEQ ID NO: 18249 - RNA, 20 nt, synthetic construct
  misc_feature 1..20: note = C9Orf72 CTCN PAM targeting sequence
  source 1..20: mol_type = other RNA
ctcttttagtctgtgtaagt

SEQ ID NO: 18250 - RNA, 20 nt, synthetic construct
  misc_feature 1..20: note = C9Orf72 CTCN PAM targeting sequence
  source 1..20: mol_type = other RNA
cacggtagttttagaaaatg

SEQ ID NO: 18251 - RNA, 20 nt, synthetic construct
  misc_feature 1..20: note = C9Orf72 CTCN PAM targeting sequence
  source 1..20: mol_type = other RNA
aaatggctaggaagaagacc

SEQ ID NO: 18252 - RNA, 20 nt, synthetic construct
  misc_feature 1..20: note = C9Orf72 CTCN PAM targeting sequence
  source 1..20: mol_type = other RNA
ctttttgcactggcatagcc

SEQ ID NO: 18253 - RNA, 20 nt, synthetic construct
  misc_feature 1..20: note = C9Orf72 CTCN PAM targeting sequence
  source 1..20: mol_type = other RNA
tagtccgtctttccctttca

SEQ ID NO: 18254 - RNA, 20 nt, synthetic construct
  misc_feature 1..20: note = C9Orf72 CTCN PAM targeting sequence
  source 1..20: mol_type = other RNA
actacacatagaaatccaac

SEQ ID NO: 18255 - RNA, 20 nt, synthetic construct
  misc_feature 1..20: note = C9Orf72 CTCN PAM targeting sequence
  source 1..20: mol_type = other RNA
gtcccaggcagtcctgaaag

SEQ ID NO: 18256 - RNA, 20 nt, synthetic construct
  misc_feature 1..20: note = C9Orf72 CTCN PAM targeting sequence
  source 1..20: mol_type = other RNA
gcaaaggcttctgtcagacc

SEQ ID NO: 18257 - RNA, 20 nt, synthetic construct
  misc_feature 1..20: note = C9Orf72 CTCN PAM targeting sequence
  source 1..20: mol_type = other RNA
ggattagcagctgctgggta

SEQ ID NO: 18258 - RNA, 20 nt, synthetic construct
  misc_feature 1..20: note = C9Orf72 CTCN PAM targeting sequence
  source 1..20: mol_type = other RNA
cactcttaaaaagcagtaaa

SEQ ID NO: 18259 - RNA, 20 nt, synthetic construct
  misc_feature 1..20: note = C9Orf72 CTCN PAM targeting sequence
  source 1..20: mol_type = other RNA
ctcttaaaaagcagtaaaat

SEQ ID NO: 18260 - RNA, 20 nt, synthetic construct
  misc_feature 1..20: note = C9Orf72 CTCN PAM targeting sequence
  source 1..20: mol_type = other RNA
taaaaagcagtaaaatagac

SEQ ID NO: 18261 - RNA, 20 nt, synthetic construct
  misc_feature 1..20: note = C9Orf72 CTCN PAM targeting sequence
  source 1..20: mol_type = other RNA
caccatacttgtttttgact

SEQ ID NO: 18262 - RNA, 20 nt, synthetic construct
  misc_feature 1..20: note = C9Orf72 CTCN PAM targeting sequence
  source 1..20: mol_type = other RNA
ctcatcttgagctcaagcca

SEQ ID NO: 18263 - RNA, 20 nt, synthetic construct
  misc_feature 1..20: note = C9Orf72 CTCN PAM targeting sequence
  source 1..20: mol_type = other RNA
tcttgagctcaagccacact

SEQ ID NO: 18264 - RNA, 20 nt, synthetic construct
  misc_feature 1..20: note = C9Orf72 CTCN PAM targeting sequence
  source 1..20: mol_type = other RNA
agatgagggagttaactccc

SEQ ID NO: 18265 - RNA, 20 nt, synthetic construct
  misc_feature 1..20: note = C9Orf72 CTCN PAM targeting sequence
  source 1..20: mol_type = other RNA
agccacacttgccttgaaat

SEQ ID NO: 18266 - RNA, 20 nt, synthetic construct
  misc_feature 1..20: note = C9Orf72 CTCN PAM targeting sequence
  source 1..20: mol_type = other RNA
cactatggaaagagagaaag

SEQ ID NO: 18267 - RNA, 20 nt, synthetic construct
  misc_feature 1..20: note = C9Orf72 CTCN PAM targeting sequence
  source 1..20: mol_type = other RNA
ctatggaaagagagaaaggc

SEQ ID NO: 18268 - RNA, 20 nt, synthetic construct
  misc_feature 1..20: note = C9Orf72 CTCN PAM targeting sequence
  source 1..20: mol_type = other RNA
ttccatagtgagagaaatta

SEQ ID NO: 18269 - RNA, 20 nt, synthetic construct
  misc_feature 1..20: note = C9Orf72 CTCN PAM targeting sequence
  source 1..20: mol_type = other RNA
ctttccatagtgagagaaat

SEQ ID NO: 18270 - RNA, 20 nt, synthetic construct
  misc_feature 1..20: note = C9Orf72 CTCN PAM targeting sequence
  source 1..20: mol_type = other RNA
atcacaggcagcattgtata

SEQ ID NO: 18271 - RNA, 20 nt, synthetic construct
  misc_feature 1..20: note = C9Orf72 CTCN PAM targeting sequence
  source 1..20: mol_type = other RNA
ccacctccatcacaggcagc

SEQ ID NO: 18272 - RNA, 20 nt, synthetic construct
  misc_feature 1..20: note = C9Orf72 CTCN PAM targeting sequence
  source 1..20: mol_type = other RNA
aacccccatcacccacatac

SEQ ID NO: 18273 - RNA, 20 nt, synthetic construct
  misc_feature 1..20: note = C9Orf72 CTCN PAM targeting sequence
  source 1..20: mol_type = other RNA
agtgccctggaagctacctc

SEQ ID NO: 18274 - RNA, 20 nt, synthetic construct
  misc_feature 1..20: note = C9Orf72 CTCN PAM targeting sequence
  source 1..20: mol_type = other RNA
aggggcctgtttccagccag

SEQ ID NO: 18275 - RNA, 20 nt, synthetic construct
  misc_feature 1..20: note = C9Orf72 CTCN PAM targeting sequence
  source 1..20: mol_type = other RNA
ttatcatatgccaagtaatg

SEQ ID NO: 18276 - RNA, 20 nt, synthetic construct
  misc_feature 1..20: note = C9Orf72 CTCN PAM targeting sequence
  source 1..20: mol_type = other RNA
aaaacagtcacataagctaa

SEQ ID NO: 18277 - RNA, 20 nt, synthetic construct
  misc_feature 1..20: note = C9Orf72 CTCN PAM targeting sequence
  source 1..20: mol_type = other RNA
tttgaactttaagtagctgt

SEQ ID NO: 18278 - RNA, 20 nt, synthetic construct
  misc_feature 1..20: note = C9Orf72 CTCN PAM targeting sequence
  source 1..20: mol_type = other RNA
tttgcccactgttttgaaat

SEQ ID NO: 18279 - RNA, 20 nt, synthetic construct
  misc_feature 1..20: note = C9Orf72 CTCN PAM targeting sequence
  source 1..20: mol_type = other RNA
gcattgcacacacaaagcat

SEQ ID NO: 18280 - RNA, 20 nt, synthetic construct
  misc_feature 1..20: note = C9Orf72 CTCN PAM targeting sequence
  source 1..20: mol_type = other RNA
tgttcgagctctctgtaaaa

SEQ ID NO: 18281 - RNA, 20 nt, synthetic construct
  misc_feature 1..20: note = C9Orf72 CTCN PAM targeting sequence
  source 1..20: mol_type = other RNA
aacaagaggcccagccaggt

SEQ ID NO: 18282 - RNA, 20 nt, synthetic construct
  misc_feature 1..20: note = C9Orf72 CTCN PAM targeting sequence
  source 1..20: mol_type = other RNA
ctgtaaaaacatagaattcc

SEQ ID NO: 18283 - RNA, 20 nt, synthetic construct
  misc_feature 1..20: note = C9Orf72 CTCN PAM targeting sequence
  source 1..20: mol_type = other RNA
gtaaaaacatagaattccat

SEQ ID NO: 18284 - RNA, 20 nt, synthetic construct
  misc_feature 1..20: note = C9Orf72 CTCN PAM targeting sequence
  source 1..20: mol_type = other RNA
tgccttcagtgagccaacag

SEQ ID NO: 18285 - RNA, 20 nt, synthetic construct
  misc_feature 1..20: note = C9Orf72 CTCN PAM targeting sequence
  source 1..20: mol_type = other RNA
ctgaaggcatgagccttagt

SEQ ID NO: 18286 - RNA, 20 nt, synthetic construct
  misc_feature 1..20: note = C9Orf72 CTCN PAM targeting sequence
  source 1..20: mol_type = other RNA
atacctgttggctcactgaa

SEQ ID NO: 18287 - RNA, 20 nt, synthetic construct
  misc_feature 1..20: note = C9Orf72 CTCN PAM targeting sequence
  source 1..20: mol_type = other RNA
ccagggtctagaacttcgcc

SEQ ID NO: 18288 - RNA, 20 nt, synthetic construct
  misc_feature 1..20: note = C9Orf72 CTCN PAM targeting sequence
  source 1..20: mol_type = other RNA
ttcatctttttctccccagg

SEQ ID NO: 18289 - RNA, 20 nt, synthetic construct
  misc_feature 1..20: note = C9Orf72 CTCN PAM targeting sequence
  source 1..20: mol_type = other RNA
tggtttagtgagagagatta

SEQ ID NO: 18290 - RNA, 20 nt, synthetic construct
  misc_feature 1..20: note = C9Orf72 CTCN PAM targeting sequence
  source 1..20: mol_type = other RNA
ctaaaccatgagcaccttta

SEQ ID NO: 18291 - RNA, 20 nt, synthetic construct
  misc_feature 1..20: note = C9Orf72 CTCN PAM targeting sequence
  source 1..20: mol_type = other RNA
cactaaaccatgagcacctt

SEQ ID NO: 18292 - RNA, 20 nt, synthetic construct
  misc_feature 1..20: note = C9Orf72 CTCN PAM targeting sequence
  source 1..20: mol_type = other RNA
ctcactaaaccatgagcacc

SEQ ID NO: 18293 - RNA, 20 nt, synthetic construct
  misc_feature 1..20: note = C9Orf72 CTCN PAM targeting sequence
  source 1..20: mol_type = other RNA
cacccctgcaataaaatatt

SEQ ID NO: 18294 - RNA, 20 nt, synthetic construct
  misc_feature 1..20: note = C9Orf72 CTCN PAM targeting sequence
  source 1..20: mol_type = other RNA
taattccacaaacacacata

SEQ ID NO: 18295 - RNA, 20 nt, synthetic construct
  misc_feature 1..20: note = C9Orf72 CTCN PAM targeting sequence
  source 1..20: mol_type = other RNA
aacactattagttgcttctt

SEQ ID NO: 18296 - RNA, 20 nt, synthetic construct
  misc_feature 1..20: note = C9Orf72 CTCN PAM targeting sequence
  source 1..20: mol_type = other RNA
caaacactattagttgcttc

SEQ ID NO: 18297 - RNA, 20 nt, synthetic construct
  misc_feature 1..20: note = C9Orf72 CTCN PAM targeting sequence
  source 1..20: mol_type = other RNA
ctcaaacactattagttgct

SEQ ID NO: 18298 - RNA, 20 nt, synthetic construct
  misc_feature 1..20: note = C9Orf72 CTCN PAM targeting sequence
  source 1..20: mol_type = other RNA
agaagagtttcccacaggag

SEQ ID NO: 18299 - RNA, 20 nt, synthetic construct
  misc_feature 1..20: note = C9Orf72 CTCN PAM targeting sequence
  source 1..20: mol_type = other RNA
tcttgagtccctctctcaaa

SEQ ID NO: 18300 - RNA, 20 nt, synthetic construct
  misc_feature 1..20: note = C9Orf72 CTCN PAM targeting sequence
  source 1..20: mol_type = other RNA
tgtgggaaactcttcttgag

SEQ ID NO: 18301 - RNA, 20 nt, synthetic construct
  misc_feature 1..20: note = C9Orf72 CTCN PAM targeting sequence
  source 1..20: mol_type = other RNA
tctcctgtgggaaactcttc

SEQ ID NO: 18302 - RNA, 20 nt, synthetic construct
  misc_feature 1..20: note = C9Orf72 CTCN PAM targeting sequence
  source 1..20: mol_type = other RNA
taccagacaaattcctattc

SEQ ID NO: 18303 - RNA, 20 nt, synthetic construct
  misc_feature 1..20: note = C9Orf72 CTCN PAM targeting sequence
  source 1..20: mol_type = other RNA
tggggaggaacctagggtgg

SEQ ID NO: 18304 - RNA, 20 nt, synthetic construct
  misc_feature 1..20: note = C9Orf72 CTCN PAM targeting sequence
  source 1..20: mol_type = other RNA
ccaagagaacaggtgctttc

SEQ ID NO: 18305 - RNA, 20 nt, synthetic construct
  misc_feature 1..20: note = C9Orf72 CTCN PAM targeting sequence
  source 1..20: mol_type = other RNA
ggagctgggagtaaggagtg

SEQ ID NO: 18306 - RNA, 20 nt, synthetic construct
  misc_feature 1..20: note = C9Orf72 CTCN PAM targeting sequence
  source 1..20: mol_type = other RNA
tgagccaccctaggttcctc

SEQ ID NO: 18307 - RNA, 20 nt, synthetic construct
  misc_feature 1..20: note = C9Orf72 CTCN PAM targeting sequence
  source 1..20: mol_type = other RNA
cagctcctgagccaccctag

SEQ ID NO: 18308 - RNA, 20 nt, synthetic construct
  misc_feature 1..20: note = C9Orf72 CTCN PAM targeting sequence
  source 1..20: mol_type = other RNA
ttactcccagctcctgagcc

SEQ ID NO: 18309 - RNA, 20 nt, synthetic construct
  misc_feature 1..20: note = C9Orf72 CTCN PAM targeting sequence
  source 1..20: mol_type = other RNA
cactccttactcccagctcc

SEQ ID NO: 18310 - RNA, 20 nt, synthetic construct
  misc_feature 1..20: note = C9Orf72 CTCN PAM targeting sequence
  source 1..20: mol_type = other RNA
cccactccttactcccagct

SEQ ID NO: 18311 - RNA, 20 nt, synthetic construct
  misc_feature 1..20: note = C9Orf72 CTCN PAM targeting sequence
  source 1..20: mol_type = other RNA
tctcccactccttactccca

SEQ ID NO: 18312 - RNA, 20 nt, synthetic construct
  misc_feature 1..20: note = C9Orf72 CTCN PAM targeting sequence
  source 1..20: mol_type = other RNA
aaagcccacctaattaggtt

SEQ ID NO: 18313 - RNA, 20 nt, synthetic construct
  misc_feature 1..20: note = C9Orf72 CTCN PAM targeting sequence
  source 1..20: mol_type = other RNA
cactccagtgctctttacac

SEQ ID NO: 18314 - RNA, 20 nt, synthetic construct
  misc_feature 1..20: note = C9Orf72 CTCN PAM targeting sequence
  source 1..20: mol_type = other RNA
ctccagtgctctttacactg

SEQ ID NO: 18315 - RNA, 20 nt, synthetic construct
  misc_feature 1..20: note = C9Orf72 CTCN PAM targeting sequence
  source 1..20: mol_type = other RNA
agtgctctttacactggacc

SEQ ID NO: 18316 - RNA, 20 nt, synthetic construct
  misc_feature 1..20: note = C9Orf72 CTCN PAM targeting sequence
  source 1..20: mol_type = other RNA
ttacactggaccttgatgct

SEQ ID NO: 18317 - RNA, 20 nt, synthetic construct
  misc_feature 1..20: note = C9Orf72 CTCN PAM targeting sequence
  source 1..20: mol_type = other RNA
tttaagctacccattgtgcc

SEQ ID NO: 18318 - RNA, 20 nt, synthetic construct
  misc_feature 1..20: note = C9Orf72 CTCN PAM targeting sequence
  source 1..20: mol_type = other RNA
gaccctcttttaagctaccc

SEQ ID NO: 18319 - RNA, 20 nt, synthetic construct
  misc_feature 1..20: note = C9Orf72 CTCN PAM targeting sequence
  source 1..20: mol_type = other RNA
ttcgaatttgcttttctggg

SEQ ID NO: 18320 - RNA, 20 nt, synthetic construct
  misc_feature 1..20: note = C9Orf72 CTCN PAM targeting sequence
  source 1..20: mol_type = other RNA
ttttattctggtaggtgtca

SEQ ID NO: 18321 - RNA, 20 nt, synthetic construct
  misc_feature 1..20: note = C9Orf72 CTCN PAM targeting sequence
  source 1..20: mol_type = other RNA
gtcctggtatcctttatttt

SEQ ID NO: 18322 - RNA, 20 nt, synthetic construct
  misc_feature 1..20: note = C9Orf72 CTCN PAM targeting sequence
  source 1..20: mol_type = other RNA
tactttaaaaaaatcctcct

SEQ ID NO: 18323 - RNA, 20 nt, synthetic construct
  misc_feature 1..20: note = C9Orf72 CTCN PAM targeting sequence
  source 1..20: mol_type = other RNA
tttgtatatattatttcttc

SEQ ID NO: 18324 - RNA, 20 nt, synthetic construct
  misc_feature 1..20: note = C9Orf72 CTCN PAM targeting sequence
  source 1..20: mol_type = other RNA
tcgttccgaagaaataatat

SEQ ID NO: 18325 - RNA, 20 nt, synthetic construct
  misc_feature 1..20: note = C9Orf72 CTCN PAM targeting sequence
  source 1..20: mol_type = other RNA
tcatgaaggcatctgattta

SEQ ID NO: 18326 - RNA, 20 nt, synthetic construct
  misc_feature 1..20: note = C9Orf72 CTCN PAM targeting sequence
  source 1..20: mol_type = other RNA
ttttctaaccttctggctta

SEQ ID NO: 18327 - RNA, 20 nt, synthetic construct
  misc_feature 1..20: note = C9Orf72 CTCN PAM targeting sequence
  source 1..20: mol_type = other RNA
acagatgatgggaggctttg

SEQ ID NO: 18328 - RNA, 20 nt, synthetic construct
  misc_feature 1..20: note = C9Orf72 CTCN PAM targeting sequence
  source 1..20: mol_type = other RNA
catcatctgtggagaaaact

SEQ ID NO: 18329 - RNA, 20 nt, synthetic construct
  misc_feature 1..20: note = C9Orf72 CTCN PAM targeting sequence
  source 1..20: mol_type = other RNA
tgcacaacttcaaagcctcc

SEQ ID NO: 18330 - RNA, 20 nt, synthetic construct
  misc_feature 1..20: note = C9Orf72 CTCN PAM targeting sequence
  source 1..20: mol_type = other RNA
cttgcacaacttcaaagcct

SEQ ID NO: 18331 - RNA, 20 nt, synthetic construct
  misc_feature 1..20: note = C9Orf72 CTCN PAM targeting sequence
  source 1..20: mol_type = other RNA
ttgtcggtggctgtgctctc

SEQ ID NO: 18332 - RNA, 20 nt, synthetic construct
  misc_feature 1..20: note = C9Orf72 CTCN PAM targeting sequence
  source 1..20: mol_type = other RNA
tttctccttgtcggtggctg

SEQ ID NO: 18333 - RNA, 20 nt, synthetic construct
  misc_feature 1..20: note = C9Orf72 CTCN PAM targeting sequence
  source 1..20: mol_type = other RNA
gaaaataaaaagtttgacca

SEQ ID NO: 18334 - RNA, 20 nt, synthetic construct
  misc_feature 1..20: note = C9Orf72 CTCN PAM targeting sequence
  source 1..20: mol_type = other RNA
tgcctgtaatcccagcactt

SEQ ID NO: 18335 - RNA, 20 nt, synthetic construct
  misc_feature 1..20: note = C9Orf72 CTCN PAM targeting sequence
  source 1..20: mol_type = other RNA
caaagtgctgggattacagg

SEQ ID NO: 18336 - RNA, 20 nt, synthetic construct
  misc_feature 1..20: note = C9Orf72 CTCN PAM targeting sequence
  source 1..20: mol_type = other RNA
gcctcccaaagtgctgggat

SEQ ID NO: 18337 - RNA, 20 nt, synthetic construct
  misc_feature 1..20: note = C9Orf72 CTCN PAM targeting sequence
  source 1..20: mol_type = other RNA
tgaccttgtgatctgcctgc

SEQ ID NO: 18338 - RNA, 20 nt, synthetic construct
  misc_feature 1..20: note = C9Orf72 CTCN PAM targeting sequence
  source 1..20: mol_type = other RNA
atctcctgaccttgtgatct

SEQ ID NO: 18339 - RNA, 20 nt, synthetic construct
  misc_feature 1..20: note = C9Orf72 CTCN PAM targeting sequence
  source 1..20: mol_type = other RNA
actaaaaatacaaaaaatta

SEQ ID NO: 18340 - RNA, 20 nt, synthetic construct
  misc_feature 1..20: note = C9Orf72 CTCN PAM targeting sequence
  source 1..20: mol_type = other RNA
caagtagctgggactacagg

SEQ ID NO: 18341 - RNA, 20 nt, synthetic construct
  misc_feature 1..20: note = C9Orf72 CTCN PAM targeting sequence
  source 1..20: mol_type = other RNA
gcctcccaagtagctgggac

SEQ ID NO: 18342 - RNA, 20 nt, synthetic construct
  misc_feature 1..20: note = C9Orf72 CTCN PAM targeting sequence
  source 1..20: mol_type = other RNA
tgcctcagcctcccaagtag

SEQ ID NO: 18343 - RNA, 20 nt, synthetic construct
  misc_feature 1..20: note = C9Orf72 CTCN PAM targeting sequence
  source 1..20: mol_type = other RNA
gccttcctggttcacgccat

SEQ ID NO: 18344 - RNA, 20 nt, synthetic construct
  misc_feature 1..20: note = C9Orf72 CTCN PAM targeting sequence
  source 1..20: mol_type = other RNA
ctgcaagctccgccttcctg

SEQ ID NO: 18345 - RNA, 20 nt, synthetic construct
  misc_feature 1..20: note = C9Orf72 CTCN PAM targeting sequence
  source 1..20: mol_type = other RNA
gctcactgcaagctccgcct

SEQ ID NO: 18346 - RNA, 20 nt, synthetic construct
  misc_feature 1..20: note = C9Orf72 CTCN PAM targeting sequence
  source 1..20: mol_type = other RNA
agcctgggcgacagagcaag

SEQ ID NO: 18347 - RNA, 20 nt, synthetic construct
  misc_feature 1..20: note = C9Orf72 CTCN PAM targeting sequence
  source 1..20: mol_type = other RNA
gtcgcccaggctggagtgca

SEQ ID NO: 18348 - RNA, 20 nt, synthetic construct
  misc_feature 1..20: note = C9Orf72 CTCN PAM targeting sequence
  source 1..20: mol_type = other RNA
gtctcaacaacaacaacaac

SEQ ID NO: 18349 - RNA, 20 nt, synthetic construct
  misc_feature 1..20: note = C9Orf72 CTCN PAM targeting sequence
  source 1..20: mol_type = other RNA
acaacaacaacaacaaaaat

SEQ ID NO: 18350 - RNA, 20 nt, synthetic construct
  misc_feature 1..20: note = C9Orf72 CTCN PAM targeting sequence
  source 1..20: mol_type = other RNA
tttaaagtcttgtctgagat

SEQ ID NO: 18351 - RNA, 20 nt, synthetic construct
  misc_feature 1..20: note = C9Orf72 CTCN PAM targeting sequence
  source 1..20: mol_type = other RNA
gacaagactttaaaagagat

SEQ ID NO: 18352 - RNA, 20 nt, synthetic construct
  misc_feature 1..20: note = C9Orf72 CTCN PAM targeting sequence
  source 1..20: mol_type = other RNA
cttcgctgctcaaattgaga

SEQ ID NO: 18353 - RNA, 20 nt, synthetic construct
  misc_feature 1..20: note = C9Orf72 CTCN PAM targeting sequence
  source 1..20: mol_type = other RNA
aattgagaatccttgtagtg

SEQ ID NO: 18354 - RNA, 20 nt, synthetic construct
  misc_feature 1..20: note = C9Orf72 CTCN PAM targeting sequence
  source 1..20: mol_type = other RNA
atttgagcagcgaagtgagt

SEQ ID NO: 18355 - RNA, 20 nt, synthetic construct
  misc_feature 1..20: note = C9Orf72 CTCN PAM targeting sequence
  source 1..20: mol_type = other RNA
tttgcaaaattctttcttct

SEQ ID NO: 18356 - RNA, 20 nt, synthetic construct
  misc_feature 1..20: note = C9Orf72 CTCN PAM targeting sequence
  source 1..20: mol_type = other RNA
aatctcatttgcaaaattct

SEQ ID NO: 18357 - RNA, 20 nt, synthetic construct
  misc_feature 1..20: note = C9Orf72 CTCN PAM targeting sequence
  source 1..20: mol_type = other RNA
caaatctcatttgcaaaatt

SEQ ID NO: 18358 - RNA, 20 nt, synthetic construct
  misc_feature 1..20: note = C9Orf72 CTCN PAM targeting sequence
  source 1..20: mol_type = other RNA
actctcaaatctcatttgca

SEQ ID NO: 18359 - RNA, 20 nt, synthetic construct
  misc_feature 1..20: note = C9Orf72 CTCN PAM targeting sequence
  source 1..20: mol_type = other RNA
ctactctcaaatctcatttg

SEQ ID NO: 18360 - RNA, 20 nt, synthetic construct
  misc_feature 1..20: note = C9Orf72 CTCN PAM targeting sequence
  source 1..20: mol_type = other RNA
taagatgtcatggacatccc

SEQ ID NO: 18361 - RNA, 20 nt, synthetic construct
  misc_feature 1..20: note = C9Orf72 CTCN PAM targeting sequence
  source 1..20: mol_type = other RNA
tacaaacaggcacaaacagc

SEQ ID NO: 18362 - RNA, 20 nt, synthetic construct
  misc_feature 1..20: note = C9Orf72 CTCN PAM targeting sequence
  source 1..20: mol_type = other RNA
ttcctcatacaaacaggcac

SEQ ID NO: 18363 - RNA, 20 nt, synthetic construct
  misc_feature 1..20: note = C9Orf72 CTCN PAM targeting sequence
  source 1..20: mol_type = other RNA
tatttttccacaactttctc

SEQ ID NO: 18364 - RNA, 20 nt, synthetic construct
  misc_feature 1..20: note = C9Orf72 CTCN PAM targeting sequence
  source 1..20: mol_type = other RNA
tccgtaatcccccttcattt

SEQ ID NO: 18365 - RNA, 20 nt, synthetic construct
  misc_feature 1..20: note = C9Orf72 CTCN PAM targeting sequence
  source 1..20: mol_type = other RNA
ttataatgatcataaaatgt

SEQ ID NO: 18366 - RNA, 20 nt, synthetic construct
  misc_feature 1..20: note = C9Orf72 CTCN PAM targeting sequence
  source 1..20: mol_type = other RNA
gggaatgcttggtaaatcca

SEQ ID NO: 18367 - RNA, 20 nt, synthetic construct
  misc_feature 1..20: note = C9Orf72 CTCN PAM targeting sequence
  source 1..20: mol_type = other RNA
caagatgaggtctacctaaa

SEQ ID NO: 18368 - RNA, 20 nt, synthetic construct
  misc_feature 1..20: note = C9Orf72 CTCN PAM targeting sequence
  source 1..20: mol_type = other RNA
agatgaggtctacctaaagg

SEQ ID NO: 18369 - RNA, 20 nt, synthetic construct
  misc_feature 1..20: note = C9Orf72 CTCN PAM targeting sequence
  source 1..20: mol_type = other RNA
tcttgagagtcacttgggca

SEQ ID NO: 18370 - RNA, 20 nt, synthetic construct
  misc_feature 1..20: note = C9Orf72 CTCN PAM targeting sequence
  source 1..20: mol_type = other RNA
agatgcaattagtaattgct

SEQ ID NO: 18371 - RNA, 20 nt, synthetic construct
  misc_feature 1..20: note = C9Orf72 CTCN PAM targeting sequence
  source 1..20: mol_type = other RNA
agttttagagctatttgggt

SEQ ID NO: 18372 - RNA, 20 nt, synthetic construct
  misc_feature 1..20: note = C9Orf72 CTCN PAM targeting sequence
  source 1..20: mol_type = other RNA
aaaactggagttaattacct

SEQ ID NO: 18373 - RNA, 20 nt, synthetic construct
  misc_feature 1..20: note = C9Orf72 CTCN PAM targeting sequence
  source 1..20: mol_type = other RNA
aatgtttgggagtctgtgtg

SEQ ID NO: 18374 - RNA, 20 nt, synthetic construct
  misc_feature 1..20: note = C9Orf72 CTCN PAM targeting sequence
  source 1..20: mol_type = other RNA
caaacattggagacatatcc

SEQ ID NO: 18375 - RNA, 20 nt, synthetic construct
  misc_feature 1..20: note = C9Orf72 CTCN PAM targeting sequence
  source 1..20: mol_type = other RNA
tttccttctacagcctgtaa

SEQ ID NO: 18376 - RNA, 20 nt, synthetic construct
  misc_feature 1..20: note = C9Orf72 CTCN PAM targeting sequence
  source 1..20: mol_type = other RNA
tgatcaaggtgtactggaat

SEQ ID NO: 18377 - RNA, 20 nt, synthetic construct
  misc_feature 1..20: note = C9Orf72 CTCN PAM targeting sequence
  source 1..20: mol_type = other RNA
ctctgctcaatgtatgtaag

SEQ ID NO: 18378 - RNA, 20 nt, synthetic construct
  misc_feature 1..20: note = C9Orf72 CTCN PAM targeting sequence
  source 1..20: mol_type = other RNA
gctcaatgtatgtaagaaca

SEQ ID NO: 18379 - RNA, 20 nt, synthetic construct
  misc_feature 1..20: note = C9Orf72 CTCN PAM targeting sequence
  source 1..20: mol_type = other RNA
atgtatgtaagaacatacat

SEQ ID NO: 18380 - RNA, 20 nt, synthetic construct
  misc_feature 1..20: note = C9Orf72 CTCN PAM targeting sequence
  source 1..20: mol_type = other RNA
aaacataaattgtaaagatt

SEQ ID NO: 18381 - RNA, 20 nt, synthetic construct
  misc_feature 1..20: note = C9Orf72 CTCN PAM targeting sequence
  source 1..20: mol_type = other RNA
taatcctgtcagccgaggag

SEQ ID NO: 18382 - RNA, 20 nt, synthetic construct
  misc_feature 1..20: note = C9Orf72 CTCN PAM targeting sequence
  source 1..20: mol_type = other RNA
gctgacaggattaagagatt

SEQ ID NO: 18383 - RNA, 20 nt, synthetic construct
  misc_feature 1..20: note = C9Orf72 CTCN PAM targeting sequence
  source 1..20: mol_type = other RNA
tcggctgacaggattaagag

SEQ ID NO: 18384 - RNA, 20 nt, synthetic construct
  misc_feature 1..20: note = C9Orf72 CTCN PAM targeting sequence
  source 1..20: mol_type = other RNA
ggaccctgtaataattgcat

SEQ ID NO: 18385 - RNA, 20 nt, synthetic construct
  misc_feature 1..20: note = C9Orf72 CTCN PAM targeting sequence
  source 1..20: mol_type = other RNA
aacacacatgctgtacaatt

SEQ ID NO: 18386 - RNA, 20 nt, synthetic construct
  misc_feature 1..20: note = C9Orf72 CTCN PAM targeting sequence
  source 1..20: mol_type = other RNA
aaaccctgtctcctgataag

SEQ ID NO: 18387 - RNA, 20 nt, synthetic construct
  misc_feature 1..20: note = C9Orf72 CTCN PAM targeting sequence
  source 1..20: mol_type = other RNA
tgataagatgttatcaatga

SEQ ID NO: 18388 - RNA, 20 nt, synthetic construct
  misc_feature 1..20: note = C9Orf72 CTCN PAM targeting sequence
  source 1..20: mol_type = other RNA
cgcctgtaatcccagcactt

SEQ ID NO: 18389 - RNA, 20 nt, synthetic construct
  misc_feature 1..20: note = C9Orf72 CTCN PAM targeting sequence
  source 1..20: mol_type = other RNA
ccctattccacataagagtt

SEQ ID NO: 18390 - RNA, 20 nt, synthetic construct
  misc_feature 1..20: note = C9Orf72 CTCN PAM targeting sequence
  source 1..20: mol_type = other RNA
tatgtggaatagggggaggg

SEQ ID NO: 18391 - RNA, 20 nt, synthetic construct
  misc_feature 1..20: note = C9Orf72 CTCN PAM targeting sequence
  source 1..20: mol_type = other RNA
cacctcagcctcctaaagtg

SEQ ID NO: 18392 - RNA, 20 nt, synthetic construct
  misc_feature 1..20: note = C9Orf72 CTCN PAM targeting sequence
  source 1..20: mol_type = other RNA
agtgatcctcccacctcagc

SEQ ID NO: 18393 - RNA, 20 nt, synthetic construct
  misc_feature 1..20: note = C9Orf72 CTCN PAM targeting sequence
  source 1..20: mol_type = other RNA
tgggctcaagtgatcctccc

SEQ ID NO: 18394 - RNA, 20 nt, synthetic construct
  misc_feature 1..20: note = C9Orf72 CTCN PAM targeting sequence
  source 1..20: mol_type = other RNA
ccaggttgcccaggctggtc

SEQ ID NO: 18395 - RNA, 20 nt, synthetic construct
  misc_feature 1..20: note = C9Orf72 CTCN PAM targeting sequence
  source 1..20: mol_type = other RNA
acaagtgatttttaaaaatc

SEQ ID NO: 18396 - RNA, 20 nt, synthetic construct
  misc_feature 1..20: note = C9Orf72 CTCN PAM targeting sequence
  source 1..20: mol_type = other RNA
aaaataaataaataaataga

SEQ ID NO: 18397 - RNA, 20 nt, synthetic construct
  misc_feature 1..20: note = C9Orf72 CTCN PAM targeting sequence
  source 1..20: mol_type = other RNA
attcatttaattaattaatt

SEQ ID NO: 18398 - RNA, 20 nt, synthetic construct
  misc_feature 1..20: note = C9Orf72 CTCN PAM targeting sequence
  source 1..20: mol_type = other RNA
gctccattcatttaattaat

SEQ ID NO: 18399 - RNA, 20 nt, synthetic construct
  misc_feature 1..20: note = C9Orf72 CTCN PAM targeting sequence
  source 1..20: mol_type = other RNA
ctcagctccattcatttaat

SEQ ID NO: 18400 - RNA, 20 nt, synthetic construct
  misc_feature 1..20: note = C9Orf72 CTCN PAM targeting sequence
  source 1..20: mol_type = other RNA
ggcatgcaggaacagggatg

SEQ ID NO: 18401 - RNA, 20 nt, synthetic construct
  misc_feature 1..20: note = C9Orf72 CTCN PAM targeting sequence
  source 1..20: mol_type = other RNA
tgccacactgtattagtttt

SEQ ID NO: 18402 - RNA, 20 nt, synthetic construct
  misc_feature 1..20: note = C9Orf72 CTCN PAM targeting sequence
  source 1..20: mol_type = other RNA
cagcctagtggaacaggcat

SEQ ID NO: 18403 - RNA, 20 nt, synthetic construct
  misc_feature 1..20: note = C9Orf72 CTCN PAM targeting sequence
  source 1..20: mol_type = other RNA
ttgaagacaaggaacccatc

SEQ ID NO: 18404 - RNA, 20 nt, synthetic construct
  misc_feature 1..20: note = C9Orf72 CTCN PAM targeting sequence
  source 1..20: mol_type = other RNA
attcaggctatgtgtaaaca

SEQ ID NO: 18405 - RNA, 20 nt, synthetic construct
  misc_feature 1..20: note = C9Orf72 CTCN PAM targeting sequence
  source 1..20: mol_type = other RNA
atactggtaatatatgaagt

SEQ ID NO: 18406 - RNA, 20 nt, synthetic construct
  misc_feature 1..20: note = C9Orf72 CTCN PAM targeting sequence
  source 1..20: mol_type = other RNA
caatactggtaatatatgaa

SEQ ID NO: 18407 - RNA, 20 nt, synthetic construct
  misc_feature 1..20: note = C9Orf72 CTCN PAM targeting sequence
  source 1..20: mol_type = other RNA
tgcctggatatcaaacaata

SEQ ID NO: 18408 - RNA, 20 nt, synthetic construct
  misc_feature 1..20: note = C9Orf72 CTCN PAM targeting sequence
  source 1..20: mol_type = other RNA
tgaaactttatctttctaaa

SEQ ID NO: 18409 - RNA, 20 nt, synthetic construct
  misc_feature 1..20: note = C9Orf72 CTCN PAM targeting sequence
  source 1..20: mol_type = other RNA
cttttctcaagggacatctc

SEQ ID NO: 18410 - RNA, 20 nt, synthetic construct
  misc_feature 1..20: note = C9Orf72 CTCN PAM targeting sequence
  source 1..20: mol_type = other RNA
agggacatctcctatcctgg

SEQ ID NO: 18411 - RNA, 20 nt, synthetic construct
  misc_feature 1..20: note = C9Orf72 CTCN PAM targeting sequence
  source 1..20: mol_type = other RNA
tatcctggaggaacagtaag

SEQ ID NO: 18412 - RNA, 20 nt, synthetic construct
  misc_feature 1..20: note = C9Orf72 CTCN PAM targeting sequence
  source 1..20: mol_type = other RNA
aggataggagatgtcccttg

SEQ ID NO: 18413 - RNA, 20 nt, synthetic construct
  misc_feature 1..20: note = C9Orf72 CTCN PAM targeting sequence
  source 1..20: mol_type = other RNA
tctaaggcacatagaagcgt

SEQ ID NO: 18414 - RNA, 20 nt, synthetic construct
  misc_feature 1..20: note = C9Orf72 CTCN PAM targeting sequence
  source 1..20: mol_type = other RNA
ctatgctaatcactttaaag

SEQ ID NO: 18415 - RNA, 20 nt, synthetic construct
  misc_feature 1..20: note = C9Orf72 CTCN PAM targeting sequence
  source 1..20: mol_type = other RNA
atgctaatcactttaaaggt

SEQ ID NO: 18416 - RNA, 20 nt, synthetic construct
  misc_feature 1..20: note = C9Orf72 CTCN PAM targeting sequence
  source 1..20: mol_type = other RNA
tttttagtgatattgcttac

SEQ ID NO: 18417 - RNA, 20 nt, synthetic construct
  misc_feature 1..20: note = C9Orf72 CTCN PAM targeting sequence
  source 1..20: mol_type = other RNA
cattacttgtatgacaaaat

SEQ ID NO: 18418 - RNA, 20 nt, synthetic construct
  misc_feature 1..20: note = C9Orf72 CTCN PAM targeting sequence
  source 1..20: mol_type = other RNA
ttacttgtatgacaaaatac

SEQ ID NO: 18419 - RNA, 20 nt, synthetic construct
  misc_feature 1..20: note = C9Orf72 CTCN PAM targeting sequence
  source 1..20: mol_type = other RNA
gttggaatacttgctgtatt

SEQ ID NO: 18420 - RNA, 20 nt, synthetic construct
  misc_feature 1..20: note = C9Orf72 CTCN PAM targeting sequence
  source 1..20: mol_type = other RNA
tgctgtgtttacatgcttaa

SEQ ID NO: 18421 - RNA, 20 nt, synthetic construct
  misc_feature 1..20: note = C9Orf72 CTCN PAM targeting sequence
  source 1..20: mol_type = other RNA
acttgttcctgcagtaggat

SEQ ID NO: 18422 - RNA, 20 nt, synthetic construct
  misc_feature 1..20: note = C9Orf72 CTCN PAM targeting sequence
  source 1..20: mol_type = other RNA
tggcaataaaaccagacttt

SEQ ID NO: 18423 - RNA, 20 nt, synthetic construct
  misc_feature 1..20: note = C9Orf72 CTCN PAM targeting sequence
  source 1..20: mol_type = other RNA
gaaggaccactgaaagtgtt

SEQ ID NO: 18424 - RNA, 20 nt, synthetic construct
  misc_feature 1..20: note = C9Orf72 CTCN PAM targeting sequence
  source 1..20: mol_type = other RNA
caggttattcgattggtcag

SEQ ID NO: 18425 - RNA, 20 nt, synthetic construct
  misc_feature 1..20: note = C9Orf72 CTCN PAM targeting sequence
  source 1..20: mol_type = other RNA
ggttattcgattggtcagtt

SEQ ID NO: 18426 - RNA, 20 nt, synthetic construct
  misc_feature 1..20: note = C9Orf72 CTCN PAM targeting sequence
  source 1..20: mol_type = other RNA
tttgttgcaaagtgggacgt

SEQ ID NO: 18427 - RNA, 20 nt, synthetic construct
  misc_feature 1..20: note = C9Orf72 CTCN PAM targeting sequence
  source 1..20: mol_type = other RNA
aggtacatgtaaaagtttag

SEQ ID NO: 18428 - RNA, 20 nt, synthetic construct
  misc_feature 1..20: note = C9Orf72 CTCN PAM targeting sequence
  source 1..20: mol_type = other RNA
atagaataataggactccaa

SEQ ID NO: 18429 - RNA, 20 nt, synthetic construct
  misc_feature 1..20: note = C9Orf72 CTCN PAM targeting sequence
  source 1..20: mol_type = other RNA
aataaatatgaggcattcca

SEQ ID NO: 18430 - RNA, 20 nt, synthetic construct
  misc_feature 1..20: note = C9Orf72 CTCN PAM targeting sequence
  source 1..20: mol_type = other RNA
tatttattggagtcctatta

SEQ ID NO: 18431 - RNA, 20 nt, synthetic construct
  misc_feature 1..20: note = C9Orf72 CTCN PAM targeting sequence
  source 1..20: mol_type = other RNA
ggtttaatcaagtcagccta

SEQ ID NO: 18432 - RNA, 20 nt, synthetic construct
  misc_feature 1..20: note = C9Orf72 CTCN PAM targeting sequence
  source 1..20: mol_type = other RNA
aaactctccctgggcttctg

SEQ ID NO: 18433 - RNA, 20 nt, synthetic construct
  misc_feature 1..20: note = C9Orf72 CTCN PAM targeting sequence
  source 1..20: mol_type = other RNA
ccctgggcttctgaagaact

SEQ ID NO: 18434 - RNA, 20 nt, synthetic construct
  misc_feature 1..20: note = C9Orf72 CTCN PAM targeting sequence
  source 1..20: mol_type = other RNA
ctgggcttctgaagaacttt

SEQ ID NO: 18435 - RNA, 20 nt, synthetic construct
  misc_feature 1..20: note = C9Orf72 CTCN PAM targeting sequence
  source 1..20: mol_type = other RNA
tacagcctcattatgctgtt

SEQ ID NO: 18436 - RNA, 20 nt, synthetic construct
  misc_feature 1..20: note = C9Orf72 CTCN PAM targeting sequence
  source 1..20: mol_type = other RNA
ttatgctgttgttattaagc

SEQ ID NO: 18437 - RNA, 20 nt, synthetic construct
  misc_feature 1..20: note = C9Orf72 CTCN PAM targeting sequence
  source 1..20: mol_type = other RNA
agaagagttggttttccatt

SEQ ID NO: 18438 - RNA, 20 nt, synthetic construct
  misc_feature 1..20: note = C9Orf72 CTCN PAM targeting sequence
  source 1..20: mol_type = other RNA
tctggaggaaaacataaatg

SEQ ID NO: 18439 - RNA, 20 nt, synthetic construct
  misc_feature 1..20: note = C9Orf72 CTCN PAM targeting sequence
  source 1..20: mol_type = other RNA
tcttcctatattccaagaaa

SEQ ID NO: 18440 - RNA, 20 nt, synthetic construct
  misc_feature 1..20: note = C9Orf72 CTCN PAM targeting sequence
  source 1..20: mol_type = other RNA
tcctatattccaagaaactc

SEQ ID NO: 18441 - RNA, 20 nt, synthetic construct
  misc_feature 1..20: note = C9Orf72 CTCN PAM targeting sequence
  source 1..20: mol_type = other RNA
agcaagtgattagtcttctt

SEQ ID NO: 18442 - RNA, 20 nt, synthetic construct
  misc_feature 1..20: note = C9Orf72 CTCN PAM targeting sequence
  source 1..20: mol_type = other RNA
atgaagaagactaatcactt

SEQ ID NO: 18443 - RNA, 20 nt, synthetic construct
  misc_feature 1..20: note = C9Orf72 CTCN PAM targeting sequence
  source 1..20: mol_type = other RNA
gaatattctttgactgcttt

SEQ ID NO: 18444 - RNA, 20 nt, synthetic construct
  misc_feature 1..20: note = C9Orf72 CTCN PAM targeting sequence
  source 1..20: mol_type = other RNA
ctgtttggggctcttataca

SEQ ID NO: 18445 - RNA, 20 nt, synthetic construct
  misc_feature 1..20: note = C9Orf72 CTCN PAM targeting sequence
  source 1..20: mol_type = other RNA
caaatcacttctgggaaatt

SEQ ID NO: 18446 - RNA, 20 nt, synthetic construct
  misc_feature 1..20: note = C9Orf72 CTCN PAM targeting sequence
  source 1..20: mol_type = other RNA
ttgtcttcttatatttgtat

SEQ ID NO: 18447 - RNA, 20 nt, synthetic construct
  misc_feature 1..20: note = C9Orf72 CTCN PAM targeting sequence
  source 1..20: mol_type = other RNA
gaacttactaataattatgt

SEQ ID NO: 18448 - RNA, 20 nt, synthetic construct
  misc_feature 1..20: note = C9Orf72 CTCN PAM targeting sequence
  source 1..20: mol_type = other RNA
tagcaatgtgaatatagtct

SEQ ID NO: 18449 - RNA, 20 nt, synthetic construct
  misc_feature 1..20: note = C9Orf72 CTCN PAM targeting sequence
  source 1..20: mol_type = other RNA
cagtagattctctaccaact

SEQ ID NO: 18450 - RNA, 20 nt, synthetic construct
  misc_feature 1..20: note = C9Orf72 CTCN PAM targeting sequence
  source 1..20: mol_type = other RNA
accaactacctccagtttct

SEQ ID NO: 18451 - RNA, 20 nt, synthetic construct
  misc_feature 1..20: note = C9Orf72 CTCN PAM targeting sequence
  source 1..20: mol_type = other RNA
agtttctattagctgatcct

SEQ ID NO: 18452 - RNA, 20 nt, synthetic construct
  misc_feature 1..20: note = C9Orf72 CTCN PAM targeting sequence
  source 1..20: mol_type = other RNA
aagaaagacaagaagatgaa

SEQ ID NO: 18453 - RNA, 20 nt, synthetic construct
  misc_feature 1..20: note = C9Orf72 CTCN PAM targeting sequence
  source 1..20: mol_type = other RNA
atctattcatattcatggtt

SEQ ID NO: 18454 - RNA, 20 nt, synthetic construct
  misc_feature 1..20: note = C9Orf72 CTCN PAM targeting sequence
  source 1..20: mol_type = other RNA
tctattatcctgctatccga

SEQ ID NO: 18455 - RNA, 20 nt, synthetic construct
  misc_feature 1..20: note = C9Orf72 CTCN PAM targeting sequence
  source 1..20: mol_type = other RNA
ccctccctgcactgtcactt

SEQ ID NO: 18456 - RNA, 20 nt, synthetic construct
  misc_feature 1..20: note = C9Orf72 CTCN PAM targeting sequence
  source 1..20: mol_type = other RNA
ctgcactgtcacttcccggc

SEQ ID NO: 18457 - RNA, 20 nt, synthetic construct
  misc_feature 1..20: note = C9Orf72 CTCN PAM targeting sequence
  source 1..20: mol_type = other RNA
aggccttgattcccagccca

SEQ ID NO: 18458 - RNA, 20 nt, synthetic construct
  misc_feature 1..20: note = C9Orf72 CTCN PAM targeting sequence
  source 1..20: mol_type = other RNA
atggtgttctcacactccaa

SEQ ID NO: 18459 - RNA, 20 nt, synthetic construct
  misc_feature 1..20: note = C9Orf72 CTCN PAM targeting sequence
  source 1..20: mol_type = other RNA
cactccaaaagcgcagaaaa

SEQ ID NO: 18460 - RNA, 20 nt, synthetic construct
  misc_feature 1..20: note = C9Orf72 CTCN PAM targeting sequence
  source 1..20: mol_type = other RNA
aaaagcgcagaaaataaaag

SEQ ID NO: 18461 - RNA, 20 nt, synthetic construct
  misc_feature 1..20: note = C9Orf72 CTCN PAM targeting sequence
  source 1..20: mol_type = other RNA
tagagtaacaacagtgctaa

SEQ ID NO: 18462 - RNA, 20 nt, synthetic construct
  misc_feature 1..20: note = C9Orf72 CTCN PAM targeting sequence
  source 1..20: mol_type = other RNA
atgaggcacaagctttcaac

SEQ ID NO: 18463 - RNA, 20 nt, synthetic construct
  misc_feature 1..20: note = C9Orf72 CTCN PAM targeting sequence
  source 1..20: mol_type = other RNA
ccaacctactgtgaggtaca

SEQ ID NO: 18464 - RNA, 20 nt, synthetic construct
  misc_feature 1..20: note = C9Orf72 CTCN PAM targeting sequence
  source 1..20: mol_type = other RNA
cagtaggttggggagtagct

SEQ ID NO: 18465 - RNA, 20 nt, synthetic construct
  misc_feature 1..20: note = C9Orf72 CTCN PAM targeting sequence
  source 1..20: mol_type = other RNA
cccttgtacctcacagtagg

SEQ ID NO: 18466 - RNA, 20 nt, synthetic construct
  misc_feature 1..20: note = C9Orf72 CTCN PAM targeting sequence
  source 1..20: mol_type = other RNA
caaagccaattaaacaatgc

SEQ ID NO: 18467 - RNA, 20 nt, synthetic construct
  misc_feature 1..20: note = C9Orf72 CTCN PAM targeting sequence
  source 1..20: mol_type = other RNA
tacgactcccaaagccaatt

SEQ ID NO: 18468 - RNA, 20 nt, synthetic construct
  misc_feature 1..20: note = C9Orf72 CTCN PAM targeting sequence
  source 1..20: mol_type = other RNA
cacagctcatacgactccca

SEQ ID NO: 18469 - RNA, 20 nt, synthetic construct
  misc_feature 1..20: note = C9Orf72 CTCN PAM targeting sequence
  source 1..20: mol_type = other RNA
aattaaaggtctcgcacagc

SEQ ID NO: 18470 - RNA, 20 nt, synthetic construct
  misc_feature 1..20: note = C9Orf72 CTCN PAM targeting sequence
  source 1..20: mol_type = other RNA
tctaattaaaggtctcgcac

SEQ ID NO: 18471 - RNA, 20 nt, synthetic construct
  misc_feature 1..20: note = C9Orf72 CTCN PAM targeting sequence
  source 1..20: mol_type = other RNA
ctaacacacacatcacacgc

SEQ ID NO: 18472 - RNA, 20 nt, synthetic construct
  misc_feature 1..20: note = C9Orf72 CTCN PAM targeting sequence
  source 1..20: mol_type = other RNA
actttcttttaagtttgtcc

SEQ ID NO: 18473 - RNA, 20 nt, synthetic construct
  misc_feature 1..20: note = C9Orf72 CTCN PAM targeting sequence
  source 1..20: mol_type = other RNA
gaattcaaataccacttaat

SEQ ID NO: 18474 - RNA, 20 nt, synthetic construct
  misc_feature 1..20: note = C9Orf72 CTCN PAM targeting sequence
  source 1..20: mol_type = other RNA
atgtcagaatgttctcatct

SEQ ID NO: 18475 - RNA, 20 nt, synthetic construct
  misc_feature 1..20: note = C9Orf72 CTCN PAM targeting sequence
  source 1..20: mol_type = other RNA
tctaggtcaacagagaaaac

SEQ ID NO: 18476 - RNA, 20 nt, synthetic construct
  misc_feature 1..20: note = C9Orf72 CTCN PAM targeting sequence
  source 1..20: mol_type = other RNA
gttgacctagatgagaacat

SEQ ID NO: 18477 - RNA, 20 nt, synthetic construct
  misc_feature 1..20: note = C9Orf72 CTCN PAM targeting sequence
  source 1..20: mol_type = other RNA
tcccagagactgttggtgct

SEQ ID NO: 18478 - RNA, 20 nt, synthetic construct
  misc_feature 1..20: note = C9Orf72 CTCN PAM targeting sequence
  source 1..20: mol_type = other RNA
gggatgagaccccagtacta

SEQ ID NO: 18479 - RNA, 20 nt, synthetic construct
  misc_feature 1..20: note = C9Orf72 CTCN PAM targeting sequence
  source 1..20: mol_type = other RNA
gcaccaacagtctctgggat

SEQ ID NO: 18480 - RNA, 20 nt, synthetic construct
  misc_feature 1..20: note = C9Orf72 CTCN PAM targeting sequence
  source 1..20: mol_type = other RNA
acatagcaactgctgctagt

SEQ ID NO: 18481 - RNA, 20 nt, synthetic construct
  misc_feature 1..20: note = C9Orf72 CTCN PAM targeting sequence
  source 1..20: mol_type = other RNA
tagaaagtgttgatttttct

SEQ ID NO: 18482 - RNA, 20 nt, synthetic construct
  misc_feature 1..20: note = C9Orf72 CTCN PAM targeting sequence
  source 1..20: mol_type = other RNA
gtgggccaaaataggcctgt

SEQ ID NO: 18483 - RNA, 20 nt, synthetic construct
  misc_feature 1..20: note = C9Orf72 CTCN PAM targeting sequence
  source 1..20: mol_type = other RNA
gattcaggaagaagaggatc

SEQ ID NO: 18484 - RNA, 20 nt, synthetic construct
  misc_feature 1..20: note = C9Orf72 CTCN PAM targeting sequence
  source 1..20: mol_type = other RNA
tcttcctgaatcagaggtcc

SEQ ID NO: 18485 - RNA, 20 nt, synthetic construct
  misc_feature 1..20: note = C9Orf72 CTCN PAM targeting sequence
  source 1..20: mol_type = other RNA
taaaatcattttgggtctat

SEQ ID NO: 18486 - RNA, 20 nt, synthetic construct
  misc_feature 1..20: note = C9Orf72 CTCN PAM targeting sequence
  source 1..20: mol_type = other RNA
tttaattaaaataagaataa

SEQ ID NO: 18487 - RNA, 20 nt, synthetic construct
  misc_feature 1..20: note = C9Orf72 CTCN PAM targeting sequence
  source 1..20: mol_type = other RNA
gagccactgctgatgtattt

SEQ ID NO: 18488 - RNA, 20 nt, synthetic construct
  misc_feature 1..20: note = C9Orf72 CTCN PAM targeting sequence
  source 1..20: mol_type = other RNA
gagatgcaaaaataaatata

SEQ ID NO: 18489 - RNA, 20 nt, synthetic construct
  misc_feature 1..20: note = C9Orf72 CTCN PAM targeting sequence
  source 1..20: mol_type = other RNA
tcatacataaaagaaataca

SEQ ID NO: 18490 - RNA, 20 nt, synthetic construct
  misc_feature 1..20: note = C9Orf72 CTCN PAM targeting sequence
  source 1..20: mol_type = other RNA
gtctcttcatacataaaaga

SEQ ID NO: 18491 - RNA, 20 nt, synthetic construct
  misc_feature 1..20: note = C9Orf72 CTCN PAM targeting sequence
  source 1..20: mol_type = other RNA
ggcttttctgtgatttttcc

SEQ ID NO: 18492 - RNA, 20 nt, synthetic construct
  misc_feature 1..20: note = C9Orf72 CTCN PAM targeting sequence
  source 1..20: mol_type = other RNA
tgcattccagcttcatcctc

SEQ ID NO: 18493 - RNA, 20 nt, synthetic construct
  misc_feature 1..20: note = C9Orf72 CTCN PAM targeting sequence
  source 1..20: mol_type = other RNA
ttatgattcaacaatcaaat

SEQ ID NO: 18494 - RNA, 20 nt, synthetic construct
  misc_feature 1..20: note = C9Orf72 CTCN PAM targeting sequence
  source 1..20: mol_type = other RNA
aaaaaatgaccaagaaagca

SEQ ID NO: 18495 - RNA, 20 nt, synthetic construct
  misc_feature 1..20: note = C9Orf72 CTCN PAM targeting sequence
  source 1..20: mol_type = other RNA
gttcatgaacctaataagct

SEQ ID NO: 18496 - RNA, 20 nt, synthetic construct
  misc_feature 1..20: note = C9Orf72 CTCN PAM targeting sequence
  source 1..20: mol_type = other RNA
ggttcttatttaaaactcat

SEQ ID NO: 18497 - RNA, 20 nt, synthetic construct
  misc_feature 1..20: note = C9Orf72 CTCN PAM targeting sequence
  source 1..20: mol_type = other RNA
tggaaaggaaatatgtcagg

SEQ ID NO: 18498 - RNA, 20 nt, synthetic construct
  misc_feature 1..20: note = C9Orf72 CTCN PAM targeting sequence
  source 1..20: mol_type = other RNA
ttttgaaatatacattgaat

SEQ ID NO: 18499 - RNA, 20 nt, synthetic construct
  misc_feature 1..20: note = C9Orf72 CTCN PAM targeting sequence
  source 1..20: mol_type = other RNA
catattcacagcactgtcca

SEQ ID NO: 18500 - RNA, 20 nt, synthetic construct
  misc_feature 1..20: note = C9Orf72 CTCN PAM targeting sequence
  source 1..20: mol_type = other RNA
tactttaacatttactaatt

SEQ ID NO: 18501 - RNA, 20 nt, synthetic construct
  misc_feature 1..20: note = C9Orf72 CTCN PAM targeting sequence
  source 1..20: mol_type = other RNA
ttagaatggcaacttctagt

SEQ ID NO: 18502 - RNA, 20 nt, synthetic construct
  misc_feature 1..20: note = C9Orf72 CTCN PAM targeting sequence
  source 1..20: mol_type = other RNA
tttccttcacaaactagaag

SEQ ID NO: 18503 - RNA, 20 nt, synthetic construct
  misc_feature 1..20: note = C9Orf72 CTCN PAM targeting sequence
  source 1..20: mol_type = other RNA
agttagatttctggttttta

SEQ ID NO: 18504 - RNA, 20 nt, synthetic construct
  misc_feature 1..20: note = C9Orf72 CTCN PAM targeting sequence
  source 1..20: mol_type = other RNA
gaactatcaataacttataa

SEQ ID NO: 18505 - RNA, 20 nt, synthetic construct
  misc_feature 1..20: note = C9Orf72 CTCN PAM targeting sequence
  source 1..20: mol_type = other RNA
attcaagtgaatttcagttc

SEQ ID NO: 18506 - RNA, 20 nt, synthetic construct
  misc_feature 1..20: note = C9Orf72 CTCN PAM targeting sequence
  source 1..20: mol_type = other RNA
ccaccccccaacccagcaca

SEQ ID NO: 18507 - RNA, 20 nt, synthetic construct
  misc_feature 1..20: note = C9Orf72 CTCN PAM targeting sequence
  source 1..20: mol_type = other RNA
caagacactttatatatcta

SEQ ID NO: 18508 - RNA, 20 nt, synthetic construct
  misc_feature 1..20: note = C9Orf72 CTCN PAM targeting sequence
  source 1..20: mol_type = other RNA
cttagacaaaaggctacagt

SEQ ID NO: 18509 - RNA, 20 nt, synthetic construct
  misc_feature 1..20: note = C9Orf72 CTCN PAM targeting sequence
  source 1..20: mol_type = other RNA
gttttggtatcagtactatg

SEQ ID NO: 18510 - RNA, 20 nt, synthetic construct
  misc_feature 1..20: note = C9Orf72 CTCN PAM targeting sequence
  source 1..20: mol_type = other RNA
gaaataacaccacaaatcta

SEQ ID NO: 18511 - RNA, 20 nt, synthetic construct
  misc_feature 1..20: note = C9Orf72 CTCN PAM targeting sequence
  source 1..20: mol_type = other RNA
ctagccgtatgtagaaagct

SEQ ID NO: 18512 - RNA, 20 nt, synthetic construct
  misc_feature 1..20: note = C9Orf72 CTCN PAM targeting sequence
  source 1..20: mol_type = other RNA
aaagaagacatttatgcgac

SEQ ID NO: 18513 - RNA, 20 nt, synthetic construct
  misc_feature 1..20: note = C9Orf72 CTCN PAM targeting sequence
  source 1..20: mol_type = other RNA
tcatcactggtcattagaga

SEQ ID NO: 18514 - RNA, 20 nt, synthetic construct
  misc_feature 1..20: note = C9Orf72 CTCN PAM targeting sequence
  source 1..20: mol_type = other RNA
aatgaccagtgatgatgagg

SEQ ID NO: 18515 - RNA, 20 nt, synthetic construct
  misc_feature 1..20: note = C9Orf72 CTCN PAM targeting sequence
  source 1..20: mol_type = other RNA
ttgtggttttgatttgcagt

SEQ ID NO: 18516 - RNA, 20 nt, synthetic construct
  misc_feature 1..20: note = C9Orf72 CTCN PAM targeting sequence
  source 1..20: mol_type = other RNA
cactagttagaatgacgaac

SEQ ID NO: 18517 - RNA, 20 nt, synthetic construct
  misc_feature 1..20: note = C9Orf72 CTCN PAM targeting sequence
  source 1..20: mol_type = other RNA
agcatctgttgtttcctgac

SEQ ID NO: 18518 - RNA, 20 nt, synthetic construct
  misc_feature 1..20: note = C9Orf72 CTCN PAM targeting sequence
  source 1..20: mol_type = other RNA
ccagcatctgttgtttcctg

SEQ ID NO: 18519 - RNA, 20 nt, synthetic construct
  misc_feature 1..20: note = C9Orf72 CTCN PAM targeting sequence
  source 1..20: mol_type = other RNA
acatcctctccagcatctgt

SEQ ID NO: 18520 - RNA, 20 nt, synthetic construct
  misc_feature 1..20: note = C9Orf72 CTCN PAM targeting sequence
  source 1..20: mol_type = other RNA
caccaacagtgtaatagcat

SEQ ID NO: 18521 - RNA, 20 nt, synthetic construct
  misc_feature 1..20: note = C9Orf72 CTCN PAM targeting sequence
  source 1..20: mol_type = other RNA
aggatctagagctagaaata

SEQ ID NO: 18522 - RNA, 20 nt, synthetic construct
  misc_feature 1..20: note = C9Orf72 CTCN PAM targeting sequence
  source 1..20: mol_type = other RNA
agatccttgaggaatcacca

SEQ ID NO: 18523 - RNA, 20 nt, synthetic construct
  misc_feature 1..20: note = C9Orf72 CTCN PAM targeting sequence
  source 1..20: mol_type = other RNA
aatgcccatcaatgatagac

SEQ ID NO: 18524 - RNA, 20 nt, synthetic construct
  misc_feature 1..20: note = C9Orf72 CTCN PAM targeting sequence
  source 1..20: mol_type = other RNA
tcctttttttggctgcatag

SEQ ID NO: 18525 - RNA, 20 nt, synthetic construct
  misc_feature 1..20: note = C9Orf72 CTCN PAM targeting sequence
  source 1..20: mol_type = other RNA
atgtccctgcaaaggacatg

SEQ ID NO: 18526 - RNA, 20 nt, synthetic construct
  misc_feature 1..20: note = C9Orf72 CTCN PAM targeting sequence
  source 1..20: mol_type = other RNA
gaatgatggttgccagcttc

SEQ ID NO: 18527 - RNA, 20 nt, synthetic construct
  misc_feature 1..20: note = C9Orf72 CTCN PAM targeting sequence
  source 1..20: mol_type = other RNA
ctcatagatgggaactgaac

SEQ ID NO: 18528 - RNA, 20 nt, synthetic construct
  misc_feature 1..20: note = C9Orf72 CTCN PAM targeting sequence
  source 1..20: mol_type = other RNA
tagatgggaactgaacaatg

SEQ ID NO: 18529 - RNA, 20 nt, synthetic construct
  misc_feature 1..20: note = C9Orf72 CTCN PAM targeting sequence
  source 1..20: mol_type = other RNA
ctgtgtccaagtgttttcat

SEQ ID NO: 18530 - RNA, 20 nt, synthetic construct
  misc_feature 1..20: note = C9Orf72 CTCN PAM targeting sequence
  source 1..20: mol_type = other RNA
ccctgtgtccaagtgttttc

SEQ ID NO: 18531 - RNA, 20 nt, synthetic construct
  misc_feature 1..20: note = C9Orf72 CTCN PAM targeting sequence
  source 1..20: mol_type = other RNA
cccatcaacccatcatttac

SEQ ID NO: 18532 - RNA, 20 nt, synthetic construct
  misc_feature 1..20: note = C9Orf72 CTCN PAM targeting sequence
  source 1..20: mol_type = other RNA
tgggttcaagtgattcactt

SEQ ID NO: 18533 - RNA, 20 nt, synthetic construct
  misc_feature 1..20: note = C9Orf72 CTCN PAM targeting sequence
  source 1..20: mol_type = other RNA
ctgcaacctacacctcctgg

SEQ ID NO: 18534 - RNA, 20 nt, synthetic construct
  misc_feature 1..20: note = C9Orf72 CTCN PAM targeting sequence
  source 1..20: mol_type = other RNA
gtcgcccagactacggtgca

SEQ ID NO: 18535 - RNA, 20 nt, synthetic construct
  misc_feature 1..20: note = C9Orf72 CTCN PAM targeting sequence
  source 1..20: mol_type = other RNA
ctctgtcgcccagactacgg

SEQ ID NO: 18536 - RNA, 20 nt, synthetic construct
  misc_feature 1..20: note = C9Orf72 CTCN PAM targeting sequence
  source 1..20: mol_type = other RNA
gtctcaaaaaaaaaaaaaaa

SEQ ID NO: 18537 - RNA, 20 nt, synthetic construct
  misc_feature 1..20: note = C9Orf72 CTCN PAM targeting sequence
  source 1..20: mol_type = other RNA
aaaaaaaaaaaaaaagtgct

SEQ ID NO: 18538 - RNA, 20 nt, synthetic construct
  misc_feature 1..20: note = C9Orf72 CTCN PAM targeting sequence
  source 1..20: mol_type = other RNA
caaatagcactttttttttt

SEQ ID NO: 18539 - RNA, 20 nt, synthetic construct
  misc_feature 1..20: note = C9Orf72 CTCN PAM targeting sequence
  source 1..20: mol_type = other RNA
tgtagatccctatctcacaa

SEQ ID NO: 18540 - RNA, 20 nt, synthetic construct
  misc_feature 1..20: note = C9Orf72 CTCN PAM targeting sequence
  source 1..20: mol_type = other RNA
tttttttgtcaagtaaacaa

SEQ ID NO: 18541 - RNA, 20 nt, synthetic construct
  misc_feature 1..20: note = C9Orf72 CTCN PAM targeting sequence
  source 1..20: mol_type = other RNA
ttcaggaaaaaaacactcac

SEQ ID NO: 18542 - RNA, 20 nt, synthetic construct
  misc_feature 1..20: note = C9Orf72 CTCN PAM targeting sequence
  source 1..20: mol_type = other RNA
ctctcaacaaaaagggcaaa

SEQ ID NO: 18543 - RNA, 20 nt, synthetic construct
  misc_feature 1..20: note = C9Orf72 CTCN PAM targeting sequence
  source 1..20: mol_type = other RNA
caacaaaaagggcaaagact

SEQ ID NO: 18544 - RNA, 20 nt, synthetic construct
  misc_feature 1..20: note = C9Orf72 CTCN PAM targeting sequence
  source 1..20: mol_type = other RNA
acaaaaagggcaaagactag

SEQ ID NO: 18545 - RNA, 20 nt, synthetic construct
  misc_feature 1..20: note = C9Orf72 CTCN PAM targeting sequence
  source 1..20: mol_type = other RNA
cttatttcttccatatatac

SEQ ID NO: 18546 - RNA, 20 nt, synthetic construct
  misc_feature 1..20: note = C9Orf72 CTCN PAM targeting sequence
  source 1..20: mol_type = other RNA
tatttcttccatatatacac

SEQ ID NO: 18547 - RNA, 20 nt, synthetic construct
  misc_feature 1..20: note = C9Orf72 CTCN PAM targeting sequence
  source 1..20: mol_type = other RNA
ctacaaatgtgacagatctc

SEQ ID NO: 18548 - RNA, 20 nt, synthetic construct
  misc_feature 1..20: note = C9Orf72 CTCN PAM targeting sequence
  source 1..20: mol_type = other RNA
agtttctagtcatgatttgc

SEQ ID NO: 18549 - RNA, 20 nt, synthetic construct
  misc_feature 1..20: note = C9Orf72 CTCN PAM targeting sequence
  source 1..20: mol_type = other RNA
acttacatacttcactgcct

SEQ ID NO: 18550 - RNA, 20 nt, synthetic construct
  misc_feature 1..20: note = C9Orf72 CTCN PAM targeting sequence
  source 1..20: mol_type = other RNA
tttgatctgaaaacaggcag

SEQ ID NO: 18551 - RNA, 20 nt, synthetic construct
  misc_feature 1..20: note = C9Orf72 CTCN PAM targeting sequence
  source 1..20: mol_type = other RNA
ttgtctcttttgatctgaaa

SEQ ID NO: 18552 - RNA, 20 nt, synthetic construct
  misc_feature 1..20: note = C9Orf72 CTCN PAM targeting sequence
  source 1..20: mol_type = other RNA
atttcaaaaccacagcaatc

SEQ ID NO: 18553 - RNA, 20 nt, synthetic construct
  misc_feature 1..20: note = C9Orf72 CTCN PAM targeting sequence
  source 1..20: mol_type = other RNA
ggtccagcactttaggacct

SEQ ID NO: 18554 - RNA, 20 nt, synthetic construct
  misc_feature 1..20: note = C9Orf72 CTCN PAM targeting sequence
  source 1..20: mol_type = other RNA
aggtcctaaagtgctggacc

SEQ ID NO: 18555 - RNA, 20 nt, synthetic construct
  misc_feature 1..20: note = C9Orf72 CTCN PAM targeting sequence
  source 1..20: mol_type = other RNA
cacacaatatcaaaccaaat

SEQ ID NO: 18556 - RNA, 20 nt, synthetic construct
  misc_feature 1..20: note = C9Orf72 CTCN PAM targeting sequence
  source 1..20: mol_type = other RNA
tccctattcatatacttatt

SEQ ID NO: 18557 - RNA, 20 nt, synthetic construct
  misc_feature 1..20: note = C9Orf72 CTCN PAM targeting sequence
  source 1..20: mol_type = other RNA
ttctgtgaagtctagggact

SEQ ID NO: 18558 - RNA, 20 nt, synthetic construct
  misc_feature 1..20: note = C9Orf72 CTCN PAM targeting sequence
  source 1..20: mol_type = other RNA
tcaacttgtcatcctgtact

SEQ ID NO: 18559 - RNA, 20 nt, synthetic construct
  misc_feature 1..20: note = C9Orf72 CTCN PAM targeting sequence
  source 1..20: mol_type = other RNA
gaataactcacaaactacag

SEQ ID NO: 18560 - RNA, 20 nt, synthetic construct
  misc_feature 1..20: note = C9Orf72 CTCN PAM targeting sequence
  source 1..20: mol_type = other RNA
caaactacagtataccccaa

SEQ ID NO: 18561 - RNA, 20 nt, synthetic construct
  misc_feature 1..20: note = C9Orf72 CTCN PAM targeting sequence
  source 1..20: mol_type = other RNA
gttggctgatgggtgttttt

SEQ ID NO: 18562 - RNA, 20 nt, synthetic construct
  misc_feature 1..20: note = C9Orf72 CTCN PAM targeting sequence
  source 1..20: mol_type = other RNA
ggacattagtcttcacacaa

SEQ ID NO: 18563 - RNA, 20 nt, synthetic construct
  misc_feature 1..20: note = C9Orf72 CTCN PAM targeting sequence
  source 1..20: mol_type = other RNA
ccaggaacacggccagggca

SEQ ID NO: 18564 - RNA, 20 nt, synthetic construct
  misc_feature 1..20: note = C9Orf72 CTCN PAM targeting sequence
  source 1..20: mol_type = other RNA
ttagctgatggctgccctgg

SEQ ID NO: 18565 - RNA, 20 nt, synthetic construct
  misc_feature 1..20: note = C9Orf72 CTCN PAM targeting sequence
  source 1..20: mol_type = other RNA
ccaggcagccactactgaag

SEQ ID NO: 18566 - RNA, 20 nt, synthetic construct
  misc_feature 1..20: note = C9Orf72 CTCN PAM targeting sequence
  source 1..20: mol_type = other RNA
aggcagccactactgaaggg

SEQ ID NO: 18567 - RNA, 20 nt, synthetic construct
  misc_feature 1..20: note = C9Orf72 CTCN PAM targeting sequence
  source 1..20: mol_type = other RNA
agatgaaaagcttttgtcat

SEQ ID NO: 18568 - RNA, 20 nt, synthetic construct
  misc_feature 1..20: note = C9Orf72 CTCN PAM targeting sequence
  source 1..20: mol_type = other RNA
aagccctcaatccaccagga

SEQ ID NO: 18569 - RNA, 20 nt, synthetic construct
  misc_feature 1..20: note = C9Orf72 CTCN PAM targeting sequence
  source 1..20: mol_type = other RNA
atccaccaggatgcccaaac

SEQ ID NO: 18570 - RNA, 20 nt, synthetic construct
  misc_feature 1..20: note = C9Orf72 CTCN PAM targeting sequence
  source 1..20: mol_type = other RNA
catctgtaagaatttagttt

SEQ ID NO: 18571 - RNA, 20 nt, synthetic construct
  misc_feature 1..20: note = C9Orf72 CTCN PAM targeting sequence
  source 1..20: mol_type = other RNA
ttagaaagactgaagatact

SEQ ID NO: 18572 - RNA, 20 nt, synthetic construct
  misc_feature 1..20: note = C9Orf72 CTCN PAM targeting sequence
  source 1..20: mol_type = other RNA
ttttatccaggttttagcct

SEQ ID NO: 18573 - RNA, 20 nt, synthetic construct
  misc_feature 1..20: note = C9Orf72 CTCN PAM targeting sequence
  source 1..20: mol_type = other RNA
attatcctgttcatctccct

SEQ ID NO: 18574 - RNA, 20 nt, synthetic construct
  misc_feature 1..20: note = C9Orf72 CTCN PAM targeting sequence
  source 1..20: mol_type = other RNA
ctgctgaattcttagcaacc

SEQ ID NO: 18575 - RNA, 20 nt, synthetic construct
  misc_feature 1..20: note = C9Orf72 CTCN PAM targeting sequence
  source 1..20: mol_type = other RNA
ctcagagatctgcagaccct

SEQ ID NO: 18576 - RNA, 20 nt, synthetic construct
  misc_feature 1..20: note = C9Orf72 CTCN PAM targeting sequence
  source 1..20: mol_type = other RNA
cagagatctgcagacccttt

SEQ ID NO: 18577 - RNA, 20 nt, synthetic construct
  misc_feature 1..20: note = C9Orf72 CTCN PAM targeting sequence
  source 1..20: mol_type = other RNA
gagatctgcagacccttttt

SEQ ID NO: 18578 - RNA, 20 nt, synthetic construct
  misc_feature 1..20: note = C9Orf72 CTCN PAM targeting sequence
  source 1..20: mol_type = other RNA
gagagaggttgctaagaatt

SEQ ID NO: 18579 - RNA, 20 nt, synthetic construct
  misc_feature 1..20: note = C9Orf72 CTCN PAM targeting sequence
  source 1..20: mol_type = other RNA
ttcccccaagaaaaagggtc

SEQ ID NO: 18580 - RNA, 20 nt, synthetic construct
  misc_feature 1..20: note = C9Orf72 CTCN PAM targeting sequence
  source 1..20: mol_type = other RNA
ttactttatcttatcttgcc

SEQ ID NO: 18581 - RNA, 20 nt, synthetic construct
  misc_feature 1..20: note = C9Orf72 CTCN PAM targeting sequence
  source 1..20: mol_type = other RNA
caaattaataagttaccata

SEQ ID NO: 18582 - RNA, 20 nt, synthetic construct
  misc_feature 1..20: note = C9Orf72 CTCN PAM targeting sequence
  source 1..20: mol_type = other RNA
actttgattttcatttatgg

SEQ ID NO: 18583 - RNA, 20 nt, synthetic construct
  misc_feature 1..20: note = C9Orf72 CTCN PAM targeting sequence
  source 1..20: mol_type = other RNA
ttcccaaagaacagcagcca

SEQ ID NO: 18584 - RNA, 20 nt, synthetic construct
  misc_feature 1..20: note = C9Orf72 CTCN PAM targeting sequence
  source 1..20: mol_type = other RNA
ccttcccaaagaacagcagc

SEQ ID NO: 18585 - RNA, 20 nt, synthetic construct
  misc_feature 1..20: note = C9Orf72 CTCN PAM targeting sequence
  source 1..20: mol_type = other RNA
gtcagcagcagcctcagtca

SEQ ID NO: 18586 - RNA, 20 nt, synthetic construct
  misc_feature 1..20: note = C9Orf72 CTCN PAM targeting sequence
  source 1..20: mol_type = other RNA
gtcagctctcctgcgctcct

SEQ ID NO: 18587 - RNA, 20 nt, synthetic construct
  misc_feature 1..20: note = C9Orf72 CTCN PAM targeting sequence
  source 1..20: mol_type = other RNA
cctgcgctcctgtctcttct

SEQ ID NO: 18588 - RNA, 20 nt, synthetic construct
  misc_feature 1..20: note = C9Orf72 CTCN PAM targeting sequence
  source 1..20: mol_type = other RNA
tgcgctcctgtctcttcttc

SEQ ID NO: 18589 - RNA, 20 nt, synthetic construct
  misc_feature 1..20: note = C9Orf72 CTCN PAM targeting sequence
  source 1..20: mol_type = other RNA
tgtctcttcttcctgcatac

SEQ ID NO: 18590 - RNA, 20 nt, synthetic construct
  misc_feature 1..20: note = C9Orf72 CTCN PAM targeting sequence
  source 1..20: mol_type = other RNA
tcttcctgcatactctgccc

SEQ ID NO: 18591 - RNA, 20 nt, synthetic construct
  misc_feature 1..20: note = C9Orf72 CTCN PAM targeting sequence
  source 1..20: mol_type = other RNA
gccccagattctgacttgaa

SEQ ID NO: 18592 - RNA, 20 nt, synthetic construct
  misc_feature 1..20: note = C9Orf72 CTCN PAM targeting sequence
  source 1..20: mol_type = other RNA
gtaaagtttggctgtccagt

SEQ ID NO: 18593 - RNA, 20 nt, synthetic construct
  misc_feature 1..20: note = C9Orf72 CTCN PAM targeting sequence
  source 1..20: mol_type = other RNA
cagttgggagtgttagaggc

SEQ ID NO: 18594 - RNA, 20 nt, synthetic construct
  misc_feature 1..20: note = C9Orf72 CTCN PAM targeting sequence
  source 1..20: mol_type = other RNA
caactgggagaataaatgcc

SEQ ID NO: 18595 - RNA, 20 nt, synthetic construct
  misc_feature 1..20: note = C9Orf72 CTCN PAM targeting sequence
  source 1..20: mol_type = other RNA
aacactcccaactgggagaa

SEQ ID NO: 18596 - RNA, 20 nt, synthetic construct
  misc_feature 1..20: note = C9Orf72 CTCN PAM targeting sequence
  source 1..20: mol_type = other RNA
gctgaaagctgccagcctct

SEQ ID NO: 18597 - RNA, 20 nt, synthetic construct
  misc_feature 1..20: note = C9Orf72 CTCN PAM targeting sequence
  source 1..20: mol_type = other RNA
caaagaagcatgcttagtta

SEQ ID NO: 18598 - RNA, 20 nt, synthetic construct
  misc_feature 1..20: note = C9Orf72 CTCN PAM targeting sequence
  source 1..20: mol_type = other RNA
aagaagcatgcttagttaga

SEQ ID NO: 18599 - RNA, 20 nt, synthetic construct
  misc_feature 1..20: note = C9Orf72 CTCN PAM targeting sequence
  source 1..20: mol_type = other RNA
aactaagcatgcttctttga

SEQ ID NO: 18600 - RNA, 20 nt, synthetic construct
  misc_feature 1..20: note = C9Orf72 CTCN PAM targeting sequence
  source 1..20: mol_type = other RNA
ctaactaagcatgcttcttt

SEQ ID NO: 18601 - RNA, 20 nt, synthetic construct
  misc_feature 1..20: note = C9Orf72 CTCN PAM targeting sequence
  source 1..20: mol_type = other RNA
ctctaactaagcatgcttct

SEQ ID NO: 18602 - RNA, 20 nt, synthetic construct
  misc_feature 1..20: note = C9Orf72 CTCN PAM targeting sequence
  source 1..20: mol_type = other RNA
agggcggtggctctctctaa

SEQ ID NO: 18603 - RNA, 20 nt, synthetic construct
  misc_feature 1..20: note = C9Orf72 CTCN PAM targeting sequence
  source 1..20: mol_type = other RNA
ctccagggcggtggctctct

SEQ ID NO: 18604 - RNA, 20 nt, synthetic construct
  misc_feature 1..20: note = C9Orf72 CTCN PAM targeting sequence
  source 1..20: mol_type = other RNA
tgggattgggcaacccacag

SEQ ID NO: 18605 - RNA, 20 nt, synthetic construct
  misc_feature 1..20: note = C9Orf72 CTCN PAM targeting sequence
  source 1..20: mol_type = other RNA
atcagccagtcattggctgt

SEQ ID NO: 18606 - RNA, 20 nt, synthetic construct
  misc_feature 1..20: note = C9Orf72 CTCN PAM targeting sequence
  source 1..20: mol_type = other RNA
ggaccactcttcaggctgtc

SEQ ID NO: 18607 - RNA, 20 nt, synthetic construct
  misc_feature 1..20: note = C9Orf72 CTCN PAM targeting sequence
  source 1..20: mol_type = other RNA
tcaggctgtcccggctccag

SEQ ID NO: 18608 - RNA, 20 nt, synthetic construct
  misc_feature 1..20: note = C9Orf72 CTCN PAM targeting sequence
  source 1..20: mol_type = other RNA
agagccccctgtgcatcaca

SEQ ID NO: 18609 - RNA, 20 nt, synthetic construct
  misc_feature 1..20: note = C9Orf72 CTCN PAM targeting sequence
  source 1..20: mol_type = other RNA
ggagccgggacagcctgaag

SEQ ID NO: 18610 - RNA, 20 nt, synthetic construct
  misc_feature 1..20: note = C9Orf72 CTCN PAM targeting sequence
  source 1..20: mol_type = other RNA
ctctgttccgttctcctgct

SEQ ID NO: 18611 - RNA, 20 nt, synthetic construct
  misc_feature 1..20: note = C9Orf72 CTCN PAM targeting sequence
  source 1..20: mol_type = other RNA
gttccgttctcctgctttca

SEQ ID NO: 18612 - RNA, 20 nt, synthetic construct
  misc_feature 1..20: note = C9Orf72 CTCN PAM targeting sequence
  source 1..20: mol_type = other RNA
tgctttcattcccctgccag

SEQ ID NO: 18613 - RNA, 20 nt, synthetic construct
  misc_feature 1..20: note = C9Orf72 CTCN PAM targeting sequence
  source 1..20: mol_type = other RNA
tacttgcaaatcacagggtc

SEQ ID NO: 18614 - RNA, 20 nt, synthetic construct
  misc_feature 1..20: note = C9Orf72 CTCN PAM targeting sequence
  source 1..20: mol_type = other RNA
gagtgagattcctggataac

SEQ ID NO: 18615 - RNA, 20 nt, synthetic construct
  misc_feature 1..20: note = C9Orf72 CTCN PAM targeting sequence
  source 1..20: mol_type = other RNA
gagaccctgtgatttgcaag

SEQ ID NO: 18616 - RNA, 20 nt, synthetic construct
  misc_feature 1..20: note = C9Orf72 CTCN PAM targeting sequence
  source 1..20: mol_type = other RNA
ctctgagaccctgtgatttg

SEQ ID NO: 18617 - RNA, 20 nt, synthetic construct
  misc_feature 1..20: note = C9Orf72 CTCN PAM targeting sequence
  source 1..20: mol_type = other RNA
ccaagccccagggccaagta

SEQ ID NO: 18618 - RNA, 20 nt, synthetic construct
  misc_feature 1..20: note = C9Orf72 CTCN PAM targeting sequence
  source 1..20: mol_type = other RNA
ggctagtgtgccctgctttc

SEQ ID NO: 18619 - RNA, 20 nt, synthetic construct
  misc_feature 1..20: note = C9Orf72 CTCN PAM targeting sequence
  source 1..20: mol_type = other RNA
ttattcatttcccaccccta

SEQ ID NO: 18620 - RNA, 20 nt, synthetic construct
  misc_feature 1..20: note = C9Orf72 CTCN PAM targeting sequence
  source 1..20: mol_type = other RNA
aaactgtaaaatcaccttat

SEQ ID NO: 18621 - RNA, 20 nt, synthetic construct
  misc_feature 1..20: note = C9Orf72 CTCN PAM targeting sequence
  source 1..20: mol_type = other RNA
tgacctccaaactgtaaaat

SEQ ID NO: 18622 - RNA, 20 nt, synthetic construct
  misc_feature 1..20: note = C9Orf72 CTCN PAM targeting sequence
  source 1..20: mol_type = other RNA
ccaaagatgtccacattctc

SEQ ID NO: 18623 - RNA, 20 nt, synthetic construct
  misc_feature 1..20: note = C9Orf72 CTCN PAM targeting sequence
  source 1..20: mol_type = other RNA
tggacaatgtcctgcattca

SEQ ID NO: 18624 - RNA, 20 nt, synthetic construct
  misc_feature 1..20: note = C9Orf72 CTCN PAM targeting sequence
  source 1..20: mol_type = other RNA
tgcaccagcccttggatgca

SEQ ID NO: 18625 - RNA, 20 nt, synthetic construct
  misc_feature 1..20: note = C9Orf72 CTCN PAM targeting sequence
  source 1..20: mol_type = other RNA
cacgtgcaaagtatatgaag

SEQ ID NO: 18626 - RNA, 20 nt, synthetic construct
  misc_feature 1..20: note = C9Orf72 CTCN PAM targeting sequence
  source 1..20: mol_type = other RNA
gctctgcctggaaactcatt

SEQ ID NO: 18627 - RNA, 20 nt, synthetic construct
  misc_feature 1..20: note = C9Orf72 CTCN PAM targeting sequence
  source 1..20: mol_type = other RNA
gcctggaaactcatttcccg

SEQ ID NO: 18628 - RNA, 20 nt, synthetic construct
  misc_feature 1..20: note = C9Orf72 CTCN PAM targeting sequence
  source 1..20: mol_type = other RNA
tttcccgtagagccattttt

SEQ ID NO: 18629 - RNA, 20 nt, synthetic construct
  misc_feature 1..20: note = C9Orf72 CTCN PAM targeting sequence
  source 1..20: mol_type = other RNA
acgggaaatgagtttccagg

SEQ ID NO: 18630 - RNA, 20 nt, synthetic construct
  misc_feature 1..20: note = C9Orf72 CTCN PAM targeting sequence
  source 1..20: mol_type = other RNA
ctcttccttctctttgactc

SEQ ID NO: 18631 - RNA, 20 nt, synthetic construct
  misc_feature 1..20: note = C9Orf72 CTCN PAM targeting sequence
  source 1..20: mol_type = other RNA
cttccttctctttgactctg

SEQ ID NO: 18632 - RNA, 20 nt, synthetic construct
  misc_feature 1..20: note = C9Orf72 CTCN PAM targeting sequence
  source 1..20: mol_type = other RNA
tccttctctttgactctggc

SEQ ID NO: 18633 - RNA, 20 nt, synthetic construct
  misc_feature 1..20: note = C9Orf72 CTCN PAM targeting sequence
  source 1..20: mol_type = other RNA
ttgactctggctctcaaaac

SEQ ID NO: 18634 - RNA, 20 nt, synthetic construct
  misc_feature 1..20: note = C9Orf72 CTCN PAM targeting sequence
  source 1..20: mol_type = other RNA
ggctctcaaaactaagggga

SEQ ID NO: 18635 - RNA, 20 nt, synthetic construct
  misc_feature 1..20: note = C9Orf72 CTCN PAM targeting sequence
  source 1..20: mol_type = other RNA
caaaactaaggggaaaaaaa

SEQ ID NO: 18636 - RNA, 20 nt, synthetic construct
  misc_feature 1..20: note = C9Orf72 CTCN PAM targeting sequence
  source 1..20: mol_type = other RNA
aaactaaggggaaaaaaatg

SEQ ID NO: 18637 - RNA, 20 nt, synthetic construct
  misc_feature 1..20: note = C9Orf72 CTCN PAM targeting sequence
  source 1..20: mol_type = other RNA
ctcttagctgtcaaatcaaa

SEQ ID NO: 18638 - RNA, 20 nt, synthetic construct
  misc_feature 1..20: note = C9Orf72 CTCN PAM targeting sequence
  source 1..20: mol_type = other RNA
cttagctgtcaaatcaaatg

SEQ ID NO: 18639 - RNA, 20 nt, synthetic construct
  misc_feature 1..20: note = C9Orf72 CTCN PAM targeting sequence
  source 1..20: mol_type = other RNA
tagctgtcaaatcaaatgcc

SEQ ID NO: 18640 - RNA, 20 nt, synthetic construct
  misc_feature 1..20: note = C9Orf72 CTCN PAM targeting sequence
  source 1..20: mol_type = other RNA
ttttcatttagcaaatgagg

SEQ ID NO: 18641 - RNA, 20 nt, synthetic construct
  misc_feature 1..20: note = C9Orf72 CTCN PAM targeting sequence
  source 1..20: mol_type = other RNA
tttgctaaatgaaaaagagt

SEQ ID NO: 18642 - RNA, 20 nt, synthetic construct
  misc_feature 1..20: note = C9Orf72 CTCN PAM targeting sequence
  source 1..20: mol_type = other RNA
gttttgataacagcacctca

SEQ ID NO: 18643 - RNA, 20 nt, synthetic construct
  misc_feature 1..20: note = C9Orf72 CTCN PAM targeting sequence
  source 1..20: mol_type = other RNA
ggatcgctactgcagtggga

SEQ ID NO: 18644 - RNA, 20 nt, synthetic construct
  misc_feature 1..20: note = C9Orf72 CTCN PAM targeting sequence
  source 1..20: mol_type = other RNA
caagtttttcttgggaacca

SEQ ID NO: 18645 - RNA, 20 nt, synthetic construct
  misc_feature 1..20: note = C9Orf72 CTCN PAM targeting sequence
  source 1..20: mol_type = other RNA
aagacttccagtggttccca

SEQ ID NO: 18646 - RNA, 20 nt, synthetic construct
  misc_feature 1..20: note = C9Orf72 CTCN PAM targeting sequence
  source 1..20: mol_type = other RNA
aacagaaggaaacttagaga

SEQ ID NO: 18647 - RNA, 20 nt, synthetic construct
  misc_feature 1..20: note = C9Orf72 CTCN PAM targeting sequence
  source 1..20: mol_type = other RNA
aagtttccttctgtttgaga

SEQ ID NO: 18648 - RNA, 20 nt, synthetic construct
  misc_feature 1..20: note = C9Orf72 CTCN PAM targeting sequence
  source 1..20: mol_type = other RNA
tttaaattttcttctggaat

SEQ ID NO: 18649 - RNA, 20 nt, synthetic construct
  misc_feature 1..20: note = C9Orf72 CTCN PAM targeting sequence
  source 1..20: mol_type = other RNA
ttatttaatatccccaatta

SEQ ID NO: 18650 - RNA, 20 nt, synthetic construct
  misc_feature 1..20: note = C9Orf72 CTCN PAM targeting sequence
  source 1..20: mol_type = other RNA
taattggggatattaaataa

SEQ ID NO: 18651 - RNA, 20 nt, synthetic construct
  misc_feature 1..20: note = C9Orf72 CTCN PAM targeting sequence
  source 1..20: mol_type = other RNA
cttgaacaaaacttccatcc

SEQ ID NO: 18652 - RNA, 20 nt, synthetic construct
  misc_feature 1..20: note = C9Orf72 CTCN PAM targeting sequence
  source 1..20: mol_type = other RNA
aggatggaagttttgttcaa

SEQ ID NO: 18653 - RNA, 20 nt, synthetic construct
  misc_feature 1..20: note = C9Orf72 CTCN PAM targeting sequence
  source 1..20: mol_type = other RNA
tgcctgtgtctgaaatgtct

SEQ ID NO: 18654 - RNA, 20 nt, synthetic construct
  misc_feature 1..20: note = C9Orf72 CTCN PAM targeting sequence
  source 1..20: mol_type = other RNA
tctcatctacccccattttt

SEQ ID NO: 18655 - RNA, 20 nt, synthetic construct
  misc_feature 1..20: note = C9Orf72 CTCN PAM targeting sequence
  source 1..20: mol_type = other RNA
catctacccccatttttcat

SEQ ID NO: 18656 - RNA, 20 nt, synthetic construct
  misc_feature 1..20: note = C9Orf72 CTCN PAM targeting sequence
  source 1..20: mol_type = other RNA
gtaaataattttgcttgttt

SEQ ID NO: 18657 - RNA, 20 nt, synthetic construct
  misc_feature 1..20: note = C9Orf72 CTCN PAM targeting sequence
  source 1..20: mol_type = other RNA
tagacacaatgataaaaatg

SEQ ID NO: 18658 - RNA, 20 nt, synthetic construct
  misc_feature 1..20: note = C9Orf72 CTCN PAM targeting sequence
  source 1..20: mol_type = other RNA
tttgctgatatagaaacaga

SEQ ID NO: 18659 - RNA, 20 nt, synthetic construct
  misc_feature 1..20: note = C9Orf72 CTCN PAM targeting sequence
  source 1..20: mol_type = other RNA
tcatatggaagcttctgttt

SEQ ID NO: 18660 - RNA, 20 nt, synthetic construct
  misc_feature 1..20: note = C9Orf72 CTCN PAM targeting sequence
  source 1..20: mol_type = other RNA
taccttcttgttttctttcc

SEQ ID NO: 18661 - RNA, 20 nt, synthetic construct
  misc_feature 1..20: note = C9Orf72 CTCN PAM targeting sequence
  source 1..20: mol_type = other RNA
gtgtatctcagaattcatag

SEQ ID NO: 18662 - RNA, 20 nt, synthetic construct
  misc_feature 1..20: note = C9Orf72 CTCN PAM targeting sequence
  source 1..20: mol_type = other RNA
gaattcatagagcacttact

SEQ ID NO: 18663 - RNA, 20 nt, synthetic construct
  misc_feature 1..20: note = C9Orf72 CTCN PAM targeting sequence
  source 1..20: mol_type = other RNA
atgaattctgagatacacgg

SEQ ID NO: 18664 - RNA, 20 nt, synthetic construct
  misc_feature 1..20: note = C9Orf72 CTCN PAM targeting sequence
  source 1..20: mol_type = other RNA
tcactggacatctcttacgg

SEQ ID NO: 18665 - RNA, 20 nt, synthetic construct
  misc_feature 1..20: note = C9Orf72 CTCN PAM targeting sequence
  source 1..20: mol_type = other RNA
ctggacatctcttacggtac

SEQ ID NO: 18666 - RNA, 20 nt, synthetic construct
  misc_feature 1..20: note = C9Orf72 CTCN PAM targeting sequence
  source 1..20: mol_type = other RNA
tacggtactttgcatccctt

SEQ ID NO: 18667 - RNA, 20 nt, synthetic construct
  misc_feature 1..20: note = C9Orf72 CTCN PAM targeting sequence
  source 1..20: mol_type = other RNA
tctgtgtgctaaatccattt

SEQ ID NO: 18668 - RNA, 20 nt, synthetic construct
  misc_feature 1..20: note = C9Orf72 CTCN PAM targeting sequence
  source 1..20: mol_type = other RNA
ggatatcaaaatcctatgga

SEQ ID NO: 18669 - RNA, 20 nt, synthetic construct
  misc_feature 1..20: note = C9Orf72 CTCN PAM targeting sequence
  source 1..20: mol_type = other RNA
tatcagtggaatactttctt

SEQ ID NO: 18670 - RNA, 20 nt, synthetic construct
  misc_feature 1..20: note = C9Orf72 CTCN PAM targeting sequence
  source 1..20: mol_type = other RNA
gtcaaaagacagtatgtttt

SEQ ID NO: 18671 - RNA, 20 nt, synthetic construct
  misc_feature 1..20: note = C9Orf72 CTCN PAM targeting sequence
  source 1..20: mol_type = other RNA
gtactaaatactgatactcc

SEQ ID NO: 18672 - RNA, 20 nt, synthetic construct
  misc_feature 1..20: note = C9Orf72 CTCN PAM targeting sequence
  source 1..20: mol_type = other RNA
gcttctggagaagcttctgt

SEQ ID NO: 18673 - RNA, 20 nt, synthetic construct
  misc_feature 1..20: note = C9Orf72 CTCN PAM targeting sequence
  source 1..20: mol_type = other RNA
aaatcctgccaggacttctt

SEQ ID NO: 18674 - RNA, 20 nt, synthetic construct
  misc_feature 1..20: note = C9Orf72 CTCN PAM targeting sequence
  source 1..20: mol_type = other RNA
tctccaaatcctgccaggac

SEQ ID NO: 18675 - RNA, 20 nt, synthetic construct
  misc_feature 1..20: note = C9Orf72 CTCN PAM targeting sequence
  source 1..20: mol_type = other RNA
tcactcttctccaaatcctg

SEQ ID NO: 18676 - RNA, 20 nt, synthetic construct
  misc_feature 1..20: note = C9Orf72 CTCN PAM targeting sequence
  source 1..20: mol_type = other RNA
gtctacaaatcgctgtctgg

SEQ ID NO: 18677 - RNA, 20 nt, synthetic construct
  misc_feature 1..20: note = C9Orf72 CTCN PAM targeting sequence
  source 1..20: mol_type = other RNA
taaaatgctaatccttccac

SEQ ID NO: 18678 - RNA, 20 nt, synthetic construct
  misc_feature 1..20: note = C9Orf72 CTCN PAM targeting sequence
  source 1..20: mol_type = other RNA
tgggaaagcaaacagctcca

SEQ ID NO: 18679 - RNA, 20 nt, synthetic construct
  misc_feature 1..20: note = C9Orf72 CTCN PAM targeting sequence
  source 1..20: mol_type = other RNA
agtaaaaataaataaataaa

SEQ ID NO: 18680 - RNA, 20 nt, synthetic construct
  misc_feature 1..20: note = C9Orf72 CTCN PAM targeting sequence
  source 1..20: mol_type = other RNA
gtctcaagtaaaaataaata

SEQ ID NO: 18681 - RNA, 20 nt, synthetic construct
  misc_feature 1..20: note = C9Orf72 CTCN PAM targeting sequence
  source 1..20: mol_type = other RNA
gttgcccaggcttgagggca

SEQ ID NO: 18682 - RNA, 20 nt, synthetic construct
  misc_feature 1..20: note = C9Orf72 CTCN PAM targeting sequence
  source 1..20: mol_type = other RNA
agcctgggcaacagagtaag

SEQ ID NO: 18683 - RNA, 20 nt, synthetic construct
  misc_feature 1..20: note = C9Orf72 CTCN PAM targeting sequence
  source 1..20: mol_type = other RNA
gccctcaagcctgggcaaca

SEQ ID NO: 18684 - RNA, 20 nt, synthetic construct
  misc_feature 1..20: note = C9Orf72 CTCN PAM targeting sequence
  source 1..20: mol_type = other RNA
gctcacttcaacctccgcct

SEQ ID NO: 18685 - RNA, 20 nt, synthetic construct
  misc_feature 1..20: note = C9Orf72 CTCN PAM targeting sequence
  source 1..20: mol_type = other RNA
cttcaacctccgcctcctgg

SEQ ID NO: 18686 - RNA, 20 nt, synthetic construct
  misc_feature 1..20: note = C9Orf72 CTCN PAM targeting sequence
  source 1..20: mol_type = other RNA
gcctcctgggttcaagcgat

SEQ ID NO: 18687 - RNA, 20 nt, synthetic construct
  misc_feature 1..20: note = C9Orf72 CTCN PAM targeting sequence
  source 1..20: mol_type = other RNA
tgggttcaagcgatcctccc

SEQ ID NO: 18688 - RNA, 20 nt, synthetic construct
  misc_feature 1..20: note = C9Orf72 CTCN PAM targeting sequence
  source 1..20: mol_type = other RNA
tgcctataatcccagcactt

SEQ ID NO: 18689 - RNA, 20 nt, synthetic construct
  misc_feature 1..20: note = C9Orf72 CTCN PAM targeting sequence
  source 1..20: mol_type = other RNA
aacaaatttatgtaacagat

SEQ ID NO: 18690 - RNA, 20 nt, synthetic construct
  misc_feature 1..20: note = C9Orf72 CTCN PAM targeting sequence
  source 1..20: mol_type = other RNA
aatctgttacataaatttgt

SEQ ID NO: 18691 - RNA, 20 nt, synthetic construct
  misc_feature 1..20: note = C9Orf72 CTCN PAM targeting sequence
  source 1..20: mol_type = other RNA
agttgttccaactttcagtg

SEQ ID NO: 18692 - RNA, 20 nt, synthetic construct
  misc_feature 1..20: note = C9Orf72 CTCN PAM targeting sequence
  source 1..20: mol_type = other RNA
tttgatgaaaatcaagaagc

SEQ ID NO: 18693 - RNA, 20 nt, synthetic construct
  misc_feature 1..20: note = C9Orf72 CTCN PAM targeting sequence
  source 1..20: mol_type = other RNA
ttttctattaccacataagc

SEQ ID NO: 18694 - RNA, 20 nt, synthetic construct
  misc_feature 1..20: note = C9Orf72 CTCN PAM targeting sequence
  source 1..20: mol_type = other RNA
ttatttttgttgtcttcccc

SEQ ID NO: 18695 - RNA, 20 nt, synthetic construct
  misc_feature 1..20: note = C9Orf72 CTCN PAM targeting sequence
  source 1..20: mol_type = other RNA
aatgttttatattgtaaaat

SEQ ID NO: 18696 - RNA, 20 nt, synthetic construct
  misc_feature 1..20: note = C9Orf72 CTCN PAM targeting sequence
  source 1..20: mol_type = other RNA
gattttaaacaaaacagaaa

SEQ ID NO: 18697 - RNA, 20 nt, synthetic construct
  misc_feature 1..20: note = C9Orf72 CTCN PAM targeting sequence
  source 1..20: mol_type = other RNA
ttttgccacagaagtcagaa

SEQ ID NO: 18698 - RNA, 20 nt, synthetic construct
  misc_feature 1..20: note = C9Orf72 CTCN PAM targeting sequence
  source 1..20: mol_type = other RNA
gatctatttagaaaaacaat

SEQ ID NO: 18699 - RNA, 20 nt, synthetic construct
  misc_feature 1..20: note = C9Orf72 CTCN PAM targeting sequence
  source 1..20: mol_type = other RNA
ccttcctgggcacctgacta

SEQ ID NO: 18700 - RNA, 20 nt, synthetic construct
  misc_feature 1..20: note = C9Orf72 CTCN PAM targeting sequence
  source 1..20: mol_type = other RNA
cacttagctgtggccatgtg

SEQ ID NO: 18701 - RNA, 20 nt, synthetic construct
  misc_feature 1..20: note = C9Orf72 CTCN PAM targeting sequence
  source 1..20: mol_type = other RNA
ggacttccagatgcttcaga

SEQ ID NO: 18702 - RNA, 20 nt, synthetic construct
  misc_feature 1..20: note = C9Orf72 CTCN PAM targeting sequence
  source 1..20: mol_type = other RNA
taatgttctgcaaaaatctc

SEQ ID NO: 18703 - RNA, 20 nt, synthetic construct
  misc_feature 1..20: note = C9Orf72 CTCN PAM targeting sequence
  source 1..20: mol_type = other RNA
gacttggcacacagtaattc

SEQ ID NO: 18704 - RNA, 20 nt, synthetic construct
  misc_feature 1..20: note = C9Orf72 CTCN PAM targeting sequence
  source 1..20: mol_type = other RNA
ggcactaactcataaaataa

SEQ ID NO: 18705 - RNA, 20 nt, synthetic construct
  misc_feature 1..20: note = C9Orf72 CTCN PAM targeting sequence
  source 1..20: mol_type = other RNA
taaaataactaaataatcta

SEQ ID NO: 18706 - RNA, 20 nt, synthetic construct
  misc_feature 1..20: note = C9Orf72 CTCN PAM targeting sequence
  source 1..20: mol_type = other RNA
aagaaatttaagcctcaggc

SEQ ID NO: 18707 - RNA, 20 nt, synthetic construct
  misc_feature 1..20: note = C9Orf72 CTCN PAM targeting sequence
  source 1..20: mol_type = other RNA
ggccaaacctgggaaattca

SEQ ID NO: 18708 - RNA, 20 nt, synthetic construct
  misc_feature 1..20: note = C9Orf72 CTCN PAM targeting sequence
  source 1..20: mol_type = other RNA
acctcaacctaagaccaatt

SEQ ID NO: 18709 - RNA, 20 nt, synthetic construct
  misc_feature 1..20: note = C9Orf72 CTCN PAM targeting sequence
  source 1..20: mol_type = other RNA
acctaagaccaattaagtaa

SEQ ID NO: 18710 - RNA, 20 nt, synthetic construct
  misc_feature 1..20: note = C9Orf72 CTCN PAM targeting sequence
  source 1..20: mol_type = other RNA
cttatactttagccaatgat

SEQ ID NO: 18711 - RNA, 20 nt, synthetic construct
  misc_feature 1..20: note = C9Orf72 CTCN PAM targeting sequence
  source 1..20: mol_type = other RNA
tttagcatttgatctttcac

SEQ ID NO: 18712 - RNA, 20 nt, synthetic construct
  misc_feature 1..20: note = C9Orf72 CTCN PAM targeting sequence
  source 1..20: mol_type = other RNA
taatcaaatacattatcaat

SEQ ID NO: 18713 - RNA, 20 nt, synthetic construct
  misc_feature 1..20: note = C9Orf72 CTCN PAM targeting sequence
  source 1..20: mol_type = other RNA
tagtgtgtcccagtcttcaa

SEQ ID NO: 18714 - RNA, 20 nt, synthetic construct
  misc_feature 1..20: note = C9Orf72 CTCN PAM targeting sequence
  source 1..20: mol_type = other RNA
tggaattatcaattttgcat

SEQ ID NO: 18715 - RNA, 20 nt, synthetic construct
  misc_feature 1..20: note = C9Orf72 CTCN PAM targeting sequence
  source 1..20: mol_type = other RNA
aaatattatagctaattaaa

SEQ ID NO: 18716 - RNA, 20 nt, synthetic construct
  misc_feature 1..20: note = C9Orf72 CTCN PAM targeting sequence
  source 1..20: mol_type = other RNA
ttcagagaaaataaagtcaa

SEQ ID NO: 18717 - RNA, 20 nt, synthetic construct
  misc_feature 1..20: note = C9Orf72 CTCN PAM targeting sequence
  source 1..20: mol_type = other RNA
gaaagagcttcttcataaat

SEQ ID NO: 18718 - RNA, 20 nt, synthetic construct
  misc_feature 1..20: note = C9Orf72 CTCN PAM targeting sequence
  source 1..20: mol_type = other RNA
ttaattcagtcagaactggg

SEQ ID NO: 18719 - RNA, 20 nt, synthetic construct
  misc_feature 1..20: note = C9Orf72 CTCN PAM targeting sequence
  source 1..20: mol_type = other RNA
ctttaattcagtcagaactg

SEQ ID NO: 18720 - RNA, 20 nt, synthetic construct
  misc_feature 1..20: note = C9Orf72 CTCN PAM targeting sequence
  source 1..20: mol_type = other RNA
gtatatataataggaaatgc

SEQ ID NO: 18721 - RNA, 20 nt, synthetic construct
  misc_feature 1..20: note = C9Orf72 CTCN PAM targeting sequence
  source 1..20: mol_type = other RNA
ttaaatgtcagggcagtctt

SEQ ID NO: 18722 - RNA, 20 nt, synthetic construct
  misc_feature 1..20: note = C9Orf72 CTCN PAM targeting sequence
  source 1..20: mol_type = other RNA
ggggtgttcaatgtggaaag

SEQ ID NO: 18723 - RNA, 20 nt, synthetic construct
  misc_feature 1..20: note = C9Orf72 CTCN PAM targeting sequence
  source 1..20: mol_type = other RNA
gctggcttgggatagcattt

SEQ ID NO: 18724 - RNA, 20 nt, synthetic construct
  misc_feature 1..20: note = C9Orf72 CTCN PAM targeting sequence
  source 1..20: mol_type = other RNA
tttctgtagctcaacatgag

SEQ ID NO: 18725 - RNA, 20 nt, synthetic construct
  misc_feature 1..20: note = C9Orf72 CTCN PAM targeting sequence
  source 1..20: mol_type = other RNA
acatgagaaaaaccaacaac

SEQ ID NO: 18726 - RNA, 20 nt, synthetic construct
  misc_feature 1..20: note = C9Orf72 CTCN PAM targeting sequence
  source 1..20: mol_type = other RNA
tgttgagctacagaaaagag

SEQ ID NO: 18727 - RNA, 20 nt, synthetic construct
  misc_feature 1..20: note = C9Orf72 CTCN PAM targeting sequence
  source 1..20: mol_type = other RNA
gcagcatgtctgccaaggaa

SEQ ID NO: 18728 - RNA, 20 nt, synthetic construct
  misc_feature 1..20: note = C9Orf72 CTCN PAM targeting sequence
  source 1..20: mol_type = other RNA
ttgccaacaggcatgcagtt

SEQ ID NO: 18729 - RNA, 20 nt, synthetic construct
  misc_feature 1..20: note = C9Orf72 CTCN PAM targeting sequence
  source 1..20: mol_type = other RNA
gtgtaggctgctgtctcctt

SEQ ID NO: 18730 - RNA, 20 nt, synthetic construct
  misc_feature 1..20: note = C9Orf72 CTCN PAM targeting sequence
  source 1..20: mol_type = other RNA
tgtaaagaagttactagggt

SEQ ID NO: 18731 - RNA, 20 nt, synthetic construct
  misc_feature 1..20: note = C9Orf72 CTCN PAM targeting sequence
  source 1..20: mol_type = other RNA
ggacatctcacggtgctccc

SEQ ID NO: 18732 - RNA, 20 nt, synthetic construct
  misc_feature 1..20: note = C9Orf72 CTCN PAM targeting sequence
  source 1..20: mol_type = other RNA
cggtgctccctccttgaagg

SEQ ID NO: 18733 - RNA, 20 nt, synthetic construct
  misc_feature 1..20: note = C9Orf72 CTCN PAM targeting sequence
  source 1..20: mol_type = other RNA
ctccttgaaggcccacagga

SEQ ID NO: 18734 - RNA, 20 nt, synthetic construct
  misc_feature 1..20: note = C9Orf72 CTCN PAM targeting sequence
  source 1..20: mol_type = other RNA
ttgaaggcccacaggagaaa

SEQ ID NO: 18735 - RNA, 20 nt, synthetic construct
  misc_feature 1..20: note = C9Orf72 CTCN PAM targeting sequence
  source 1..20: mol_type = other RNA
tgtgggccttcaaggaggga

SEQ ID NO: 18736 - RNA, 20 nt, synthetic construct
  misc_feature 1..20: note = C9Orf72 CTCN PAM targeting sequence
  source 1..20: mol_type = other RNA
cagaactcagtaccaagaga

SEQ ID NO: 18737 - RNA, 20 nt, synthetic construct
  misc_feature 1..20: note = C9Orf72 CTCN PAM targeting sequence
  source 1..20: mol_type = other RNA
gtaccaagagaagctttcct

SEQ ID NO: 18738 - RNA, 20 nt, synthetic construct
  misc_feature 1..20: note = C9Orf72 CTCN PAM targeting sequence
  source 1..20: mol_type = other RNA
tggtactgagttctgggagg

SEQ ID NO: 18739 - RNA, 20 nt, synthetic construct
  misc_feature 1..20: note = C9Orf72 CTCN PAM targeting sequence
  source 1..20: mol_type = other RNA
tgaagacttagttttgttgt

SEQ ID NO: 18740 - RNA, 20 nt, synthetic construct
  misc_feature 1..20: note = C9Orf72 CTCN PAM targeting sequence
  source 1..20: mol_type = other RNA
atagttcccagtttccattt

SEQ ID NO: 18741 - RNA, 20 nt, synthetic construct
  misc_feature 1..20: note = C9Orf72 CTCN PAM targeting sequence
  source 1..20: mol_type = other RNA
tctttaaactgaggctagta

SEQ ID NO: 18742 - RNA, 20 nt, synthetic construct
  misc_feature 1..20: note = C9Orf72 CTCN PAM targeting sequence
  source 1..20: mol_type = other RNA
ttaaactgaggctagtatca

SEQ ID NO: 18743 - RNA, 20 nt, synthetic construct
  misc_feature 1..20: note = C9Orf72 CTCN PAM targeting sequence
  source 1..20: mol_type = other RNA
gtttaaagaggaggaaatgg

SEQ ID NO: 18744 - RNA, 20 nt, synthetic construct
  misc_feature 1..20: note = C9Orf72 CTCN PAM targeting sequence
  source 1..20: mol_type = other RNA
cagttactatgcaatgtaca

SEQ ID NO: 18745 - RNA, 20 nt, synthetic construct
  misc_feature 1..20: note = C9Orf72 CTCN PAM targeting sequence
  source 1..20: mol_type = other RNA
ttaattctcacagttactat

SEQ ID NO: 18746 - RNA, 20 nt, synthetic construct
  misc_feature 1..20: note = C9Orf72 CTCN PAM targeting sequence
  source 1..20: mol_type = other RNA
agatacattctctttaattc

SEQ ID NO: 18747 - RNA, 20 nt, synthetic construct
  misc_feature 1..20: note = C9Orf72 CTCN PAM targeting sequence
  source 1..20: mol_type = other RNA
taagcctgtcaacatgataa

SEQ ID NO: 18748 - RNA, 20 nt, synthetic construct
  misc_feature 1..20: note = C9Orf72 CTCN PAM targeting sequence
  source 1..20: mol_type = other RNA
tataccacatttctctctaa

SEQ ID NO: 18749 - RNA, 20 nt, synthetic construct
  misc_feature 1..20: note = C9Orf72 CTCN PAM targeting sequence
  source 1..20: mol_type = other RNA
ctaacaaagacctacagtta

SEQ ID NO: 18750 - RNA, 20 nt, synthetic construct
  misc_feature 1..20: note = C9Orf72 CTCN PAM targeting sequence
  source 1..20: mol_type = other RNA
aacaaagacctacagttaaa

SEQ ID NO: 18751 - RNA, 20 nt, synthetic construct
  misc_feature 1..20: note = C9Orf72 CTCN PAM targeting sequence
  source 1..20: mol_type = other RNA
atgtctccaagccattcttt

SEQ ID NO: 18752 - RNA, 20 nt, synthetic construct
  misc_feature 1..20: note = C9Orf72 CTCN PAM targeting sequence
  source 1..20: mol_type = other RNA
aagccattctttccaacatg

SEQ ID NO: 18753 - RNA, 20 nt, synthetic construct
  misc_feature 1..20: note = C9Orf72 CTCN PAM targeting sequence
  source 1..20: mol_type = other RNA
ccccattaaggctccctgta

SEQ ID NO: 18754 - RNA, 20 nt, synthetic construct
  misc_feature 1..20: note = C9Orf72 CTCN PAM targeting sequence
  source 1..20: mol_type = other RNA
ccattaaggctccctgtacc

SEQ ID NO: 18755 - RNA, 20 nt, synthetic construct
  misc_feature 1..20: note = C9Orf72 CTCN PAM targeting sequence
  source 1..20: mol_type = other RNA
ctgtaccatatcccctgtcg

SEQ ID NO: 18756 - RNA, 20 nt, synthetic construct
  misc_feature 1..20: note = C9Orf72 CTCN PAM targeting sequence
  source 1..20: mol_type = other RNA
cccaaaaatatactgaagtt

SEQ ID NO: 18757 - RNA, 20 nt, synthetic construct
  misc_feature 1..20: note = C9Orf72 CTCN PAM targeting sequence
  source 1..20: mol_type = other RNA
atagttacatgacatttttc

SEQ ID NO: 18758 - RNA, 20 nt, synthetic construct
  misc_feature 1..20: note = C9Orf72 CTCN PAM targeting sequence
  source 1..20: mol_type = other RNA
gcctccatagttacatgaca

SEQ ID NO: 18759 - RNA, 20 nt, synthetic construct
  misc_feature 1..20: note = C9Orf72 CTCN PAM targeting sequence
  source 1..20: mol_type = other RNA
tttagcttctggtacttgct

SEQ ID NO: 18760 - RNA, 20 nt, synthetic construct
  misc_feature 1..20: note = C9Orf72 CTCN PAM targeting sequence
  source 1..20: mol_type = other RNA
aaacaagaatccttccttgc

SEQ ID NO: 18761 - RNA, 20 nt, synthetic construct
  misc_feature 1..20: note = C9Orf72 CTCN PAM targeting sequence
  source 1..20: mol_type = other RNA
gattttggacttccagactc

SEQ ID NO: 18762 - RNA, 20 nt, synthetic construct
  misc_feature 1..20: note = C9Orf72 CTCN PAM targeting sequence
  source 1..20: mol_type = other RNA
aggactatgagagaataaat

SEQ ID NO: 18763 - RNA, 20 nt, synthetic construct
  misc_feature 1..20: note = C9Orf72 CTCN PAM targeting sequence
  source 1..20: mol_type = other RNA
tagtcctagagtctggaagt

SEQ ID NO: 18764 - RNA, 20 nt, synthetic construct
  misc_feature 1..20: note = C9Orf72 CTCN PAM targeting sequence
  source 1..20: mol_type = other RNA
catagtcctagagtctggaa

SEQ ID NO: 18765 - RNA, 20 nt, synthetic construct
  misc_feature 1..20: note = C9Orf72 CTCN PAM targeting sequence
  source 1..20: mol_type = other RNA
tacagccccaagtggcagaa

SEQ ID NO: 18766 - RNA, 20 nt, synthetic construct
  misc_feature 1..20: note = C9Orf72 CTCN PAM targeting sequence
  source 1..20: mol_type = other RNA
acacatacatgcctggcagt

SEQ ID NO: 18767 - RNA, 20 nt, synthetic construct
  misc_feature 1..20: note = C9Orf72 CTCN PAM targeting sequence
  source 1..20: mol_type = other RNA
catgaaatacatcttactgc

SEQ ID NO: 18768 - RNA, 20 nt, synthetic construct
  misc_feature 1..20: note = C9Orf72 CTCN PAM targeting sequence
  source 1..20: mol_type = other RNA
ttgggctattttagtatatg

SEQ ID NO: 18769 - RNA, 20 nt, synthetic construct
  misc_feature 1..20: note = C9Orf72 CTCN PAM targeting sequence
  source 1..20: mol_type = other RNA
tcaatgaattaattcttctt

SEQ ID NO: 18770 - RNA, 20 nt, synthetic construct
  misc_feature 1..20: note = C9Orf72 CTCN PAM targeting sequence
  source 1..20: mol_type = other RNA
gaaagaagaattaattcatt

SEQ ID NO: 18771 - RNA, 20 nt, synthetic construct
  misc_feature 1..20: note = C9Orf72 CTCN PAM targeting sequence
  source 1..20: mol_type = other RNA
tgttgatgtgattcttttaa

SEQ ID NO: 18772 - RNA, 20 nt, synthetic construct
  misc_feature 1..20: note = C9Orf72 CTCN PAM targeting sequence
  source 1..20: mol_type = other RNA
atttgccattgttgatctag

SEQ ID NO: 18773 - RNA, 20 nt, synthetic construct
  misc_feature 1..20: note = C9Orf72 CTCN PAM targeting sequence
  source 1..20: mol_type = other RNA
gttaagctctatttgccatt

SEQ ID NO: 18774 - RNA, 20 nt, synthetic construct
  misc_feature 1..20: note = C9Orf72 CTCN PAM targeting sequence
  source 1..20: mol_type = other RNA
acagaattttgaacataaca

SEQ ID NO: 18775 - RNA, 20 nt, synthetic construct
  misc_feature 1..20: note = C9Orf72 CTCN PAM targeting sequence
  source 1..20: mol_type = other RNA
gcatctttgcccagatgact

SEQ ID NO: 18776 - RNA, 20 nt, synthetic construct
  misc_feature 1..20: note = C9Orf72 CTCN PAM targeting sequence
  source 1..20: mol_type = other RNA
ccagtttcctcttctgctgc

SEQ ID NO: 18777 - RNA, 20 nt, synthetic construct
  misc_feature 1..20: note = C9Orf72 CTCN PAM targeting sequence
  source 1..20: mol_type = other RNA
agtttcctcttctgctgccc

SEQ ID NO: 18778 - RNA, 20 nt, synthetic construct
  misc_feature 1..20: note = C9Orf72 CTCN PAM targeting sequence
  source 1..20: mol_type = other RNA
tctgctgcccactgtaacat

SEQ ID NO: 18779 - RNA, 20 nt, synthetic construct
  misc_feature 1..20: note = C9Orf72 CTCN PAM targeting sequence
  source 1..20: mol_type = other RNA
ttggacagacccactgattc

SEQ ID NO: 18780 - RNA, 20 nt, synthetic construct
  misc_feature 1..20: note = C9Orf72 CTCN PAM targeting sequence
  source 1..20: mol_type = other RNA
cctggcagcatcagtcttct

SEQ ID NO: 18781 - RNA, 20 nt, synthetic construct
  misc_feature 1..20: note = C9Orf72 CTCN PAM targeting sequence
  source 1..20: mol_type = other RNA
tggcagcatcagtcttctgc

SEQ ID NO: 18782 - RNA, 20 nt, synthetic construct
  misc_feature 1..20: note = C9Orf72 CTCN PAM targeting sequence
  source 1..20: mol_type = other RNA
tgtctaggcccatatatcca

SEQ ID NO: 18783 - RNA, 20 nt, synthetic construct
  misc_feature 1..20: note = C9Orf72 CTCN PAM targeting sequence
  source 1..20: mol_type = other RNA
acttagctatctcagacaat

SEQ ID NO: 18784 - RNA, 20 nt, synthetic construct
  misc_feature 1..20: note = C9Orf72 CTCN PAM targeting sequence
  source 1..20: mol_type = other RNA
gacaattcaaagcaacttgt

SEQ ID NO: 18785 - RNA, 20 nt, synthetic construct
  misc_feature 1..20: note = C9Orf72 CTCN PAM targeting sequence
  source 1..20: mol_type = other RNA
ccagttgctcccctaagcct

SEQ ID NO: 18786 - RNA, 20 nt, synthetic construct
  misc_feature 1..20: note = C9Orf72 CTCN PAM targeting sequence
  source 1..20: mol_type = other RNA
cctaagcctgctcctcctcc

SEQ ID NO: 18787 - RNA, 20 nt, synthetic construct
  misc_feature 1..20: note = C9Orf72 CTCN PAM targeting sequence
  source 1..20: mol_type = other RNA
tcctcccacaggctatctct

SEQ ID NO: 18788 - RNA, 20 nt, synthetic construct
  misc_feature 1..20: note = C9Orf72 CTCN PAM targeting sequence
  source 1..20: mol_type = other RNA
tcccacaggctatctctcag

SEQ ID NO: 18789 - RNA, 20 nt, synthetic construct
  misc_feature 1..20: note = C9Orf72 CTCN PAM targeting sequence
  source 1..20: mol_type = other RNA
cacaggctatctctcagctg

SEQ ID NO: 18790 - RNA, 20 nt, synthetic construct
  misc_feature 1..20: note = C9Orf72 CTCN PAM targeting sequence
  source 1..20: mol_type = other RNA
cagctggtggcacgatcata

SEQ ID NO: 18791 - RNA, 20 nt, synthetic construct
  misc_feature 1..20: note = C9Orf72 CTCN PAM targeting sequence
  source 1..20: mol_type = other RNA
gctggtggcacgatcatata

SEQ ID NO: 18792 - RNA, 20 nt, synthetic construct
  misc_feature 1..20: note = C9Orf72 CTCN PAM targeting sequence
  source 1..20: mol_type = other RNA
gttttctagctaggtatatg

SEQ ID NO: 18793 - RNA, 20 nt, synthetic construct
  misc_feature 1..20: note = C9Orf72 CTCN PAM targeting sequence
  source 1..20: mol_type = other RNA
ctagtctatttcctccttct

SEQ ID NO: 18794 - RNA, 20 nt, synthetic construct
  misc_feature 1..20: note = C9Orf72 CTCN PAM targeting sequence
  source 1..20: mol_type = other RNA
ttctcacccccgcctcccat

SEQ ID NO: 18795 - RNA, 20 nt, synthetic construct
  misc_feature 1..20: note = C9Orf72 CTCN PAM targeting sequence
  source 1..20: mol_type = other RNA
cccccgcctcccattccaaa

SEQ ID NO: 18796 - RNA, 20 nt, synthetic construct
  misc_feature 1..20: note = C9Orf72 CTCN PAM targeting sequence
  source 1..20: mol_type = other RNA
cattccaaatcaatttccaa

SEQ ID NO: 18797 - RNA, 20 nt, synthetic construct
  misc_feature 1..20: note = C9Orf72 CTCN PAM targeting sequence
  source 1..20: mol_type = other RNA
cctaattcaaactctcatca

SEQ ID NO: 18798 - RNA, 20 nt, synthetic construct
  misc_feature 1..20: note = C9Orf72 CTCN PAM targeting sequence
  source 1..20: mol_type = other RNA
taattcaaactctcatcaac

SEQ ID NO: 18799 - RNA, 20 nt, synthetic construct
  misc_feature 1..20: note = C9Orf72 CTCN PAM targeting sequence
  source 1..20: mol_type = other RNA
catcaactcttgccttttaa

SEQ ID NO: 18800 - RNA, 20 nt, synthetic construct
  misc_feature 1..20: note = C9Orf72 CTCN PAM targeting sequence
  source 1..20: mol_type = other RNA
tcaactcttgccttttaaga

SEQ ID NO: 18801 - RNA, 20 nt, synthetic construct
  misc_feature 1..20: note = C9Orf72 CTCN PAM targeting sequence
  source 1..20: mol_type = other RNA
tgccttttaagattaagact

SEQ ID NO: 18802 - RNA, 20 nt, synthetic construct
  misc_feature 1..20: note = C9Orf72 CTCN PAM targeting sequence
  source 1..20: mol_type = other RNA
aggaacctctgcaagggact

SEQ ID NO: 18803 - RNA, 20 nt, synthetic construct
  misc_feature 1..20: note = C9Orf72 CTCN PAM targeting sequence
  source 1..20: mol_type = other RNA
gcaagggactgtatttgtct

SEQ ID NO: 18804 - RNA, 20 nt, synthetic construct
  misc_feature 1..20: note = C9Orf72 CTCN PAM targeting sequence
  source 1..20: mol_type = other RNA
tttttttttttttttttttt

SEQ ID NO: 18805 - RNA, 20 nt, synthetic construct
  misc_feature 1..20: note = C9Orf72 CTCN PAM targeting sequence
  source 1..20: mol_type = other RNA
taagataaaatactgaaatg

SEQ ID NO: 18806 - RNA, 20 nt, synthetic construct
  misc_feature 1..20: note = C9Orf72 CTCN PAM targeting sequence
  source 1..20: mol_type = other RNA
cttacttgtttgttttcttt

SEQ ID NO: 18807 - RNA, 20 nt, synthetic construct
  misc_feature 1..20: note = C9Orf72 CTCN PAM targeting sequence
  source 1..20: mol_type = other RNA
caggaaacccattccaagct

SEQ ID NO: 18808 - RNA, 20 nt, synthetic construct
  misc_feature 1..20: note = C9Orf72 CTCN PAM targeting sequence
  source 1..20: mol_type = other RNA
ggaaacccattccaagcttc

SEQ ID NO: 18809 - RNA, 20 nt, synthetic construct
  misc_feature 1..20: note = C9Orf72 CTCN PAM targeting sequence
  source 1..20: mol_type = other RNA
tcatttcttcccaattacag

SEQ ID NO: 18810 - RNA, 20 nt, synthetic construct
  misc_feature 1..20: note = C9Orf72 CTCN PAM targeting sequence
  source 1..20: mol_type = other RNA
tggatgtgatctaggaaaaa

SEQ ID NO: 18811 - RNA, 20 nt, synthetic construct
  misc_feature 1..20: note = C9Orf72 CTCN PAM targeting sequence
  source 1..20: mol_type = other RNA
gtgaatagatgtggattttt

SEQ ID NO: 18812 - RNA, 20 nt, synthetic construct
  misc_feature 1..20: note = C9Orf72 CTCN PAM targeting sequence
  source 1..20: mol_type = other RNA
ttactcagtgaatagatgtg

SEQ ID NO: 18813 - RNA, 20 nt, synthetic construct
  misc_feature 1..20: note = C9Orf72 CTCN PAM targeting sequence
  source 1..20: mol_type = other RNA
gaagtaaaagccccattcgg

SEQ ID NO: 18814 - RNA, 20 nt, synthetic construct
  misc_feature 1..20: note = C9Orf72 CTCN PAM targeting sequence
  source 1..20: mol_type = other RNA
aaaggacccagggaaatcaa

SEQ ID NO: 18815 - RNA, 20 nt, synthetic construct
  misc_feature 1..20: note = C9Orf72 CTCN PAM targeting sequence
  source 1..20: mol_type = other RNA
tttcagtgttgatttccctg

SEQ ID NO: 18816 - RNA, 20 nt, synthetic construct
  misc_feature 1..20: note = C9Orf72 CTCN PAM targeting sequence
  source 1..20: mol_type = other RNA
atccatatcctcatttcagt

SEQ ID NO: 18817 - RNA, 20 nt, synthetic construct
  misc_feature 1..20: note = C9Orf72 CTCN PAM targeting sequence
  source 1..20: mol_type = other RNA
gttttaggatgaccagaaca

SEQ ID NO: 18818 - RNA, 20 nt, synthetic construct
  misc_feature 1..20: note = C9Orf72 CTCN PAM targeting sequence
  source 1..20: mol_type = other RNA
ctgttttaggatgaccagaa

SEQ ID NO: 18819 - RNA, 20 nt, synthetic construct
  misc_feature 1..20: note = C9Orf72 CTCN PAM targeting sequence
  source 1..20: mol_type = other RNA
gtaaataaacgtgtaccatc

SEQ ID NO: 18820 - RNA, 20 nt, synthetic construct
  misc_feature 1..20: note = C9Orf72 CTCN PAM targeting sequence
  source 1..20: mol_type = other RNA
aattatttctgggtgggaag

SEQ ID NO: 18821 - RNA, 20 nt, synthetic construct
  misc_feature 1..20: note = C9Orf72 CTCN PAM targeting sequence
  source 1..20: mol_type = other RNA
ttggacaaactaatatccag

SEQ ID NO: 18822 - RNA, 20 nt, synthetic construct
  misc_feature 1..20: note = C9Orf72 CTCN PAM targeting sequence
  source 1..20: mol_type = other RNA
aaggttgataaaattaaatg

SEQ ID NO: 18823 - RNA, 20 nt, synthetic construct
  misc_feature 1..20: note = C9Orf72 CTCN PAM targeting sequence
  source 1..20: mol_type = other RNA
ctgtagctgtcatttaattt

SEQ ID NO: 18824 - RNA, 20 nt, synthetic construct
  misc_feature 1..20: note = C9Orf72 CTCN PAM targeting sequence
  source 1..20: mol_type = other RNA
accacccccttttgctgctt

SEQ ID NO: 18825 - RNA, 20 nt, synthetic construct
  misc_feature 1..20: note = C9Orf72 CTCN PAM targeting sequence
  source 1..20: mol_type = other RNA
ccaccacccccttttgctgc

SEQ ID NO: 18826 - RNA, 20 nt, synthetic construct
  misc_feature 1..20: note = C9Orf72 CTCN PAM targeting sequence
  source 1..20: mol_type = other RNA
gcagttttgcctatacaggt

SEQ ID NO: 18827 - RNA, 20 nt, synthetic construct
  misc_feature 1..20: note = C9Orf72 CTCN PAM targeting sequence
  source 1..20: mol_type = other RNA
aatctgattcagtaataacc

SEQ ID NO: 18828 - RNA, 20 nt, synthetic construct
  misc_feature 1..20: note = C9Orf72 CTCN PAM targeting sequence
  source 1..20: mol_type = other RNA
agaagaaaaatgtgtctttc

SEQ ID NO: 18829 - RNA, 20 nt, synthetic construct
  misc_feature 1..20: note = C9Orf72 CTCN PAM targeting sequence
  source 1..20: mol_type = other RNA
agtgatgtcacacagttttg

SEQ ID NO: 18830 - RNA, 20 nt, synthetic construct
  misc_feature 1..20: note = C9Orf72 CTCN PAM targeting sequence
  source 1..20: mol_type = other RNA
actctagtgatgtcacacag

SEQ ID NO: 18831 - RNA, 20 nt, synthetic construct
  misc_feature 1..20: note = C9Orf72 CTCN PAM targeting sequence
  source 1..20: mol_type = other RNA
tgatctgaccagcctcgggg

SEQ ID NO: 18832 - RNA, 20 nt, synthetic construct
  misc_feature 1..20: note = C9Orf72 CTCN PAM targeting sequence
  source 1..20: mol_type = other RNA
gggaatcccaaggagaatgc

SEQ ID NO: 18833 - RNA, 20 nt, synthetic construct
  misc_feature 1..20: note = C9Orf72 CTCN PAM targeting sequence
  source 1..20: mol_type = other RNA
ttgggattccccgaggctgg

SEQ ID NO: 18834 - RNA, 20 nt, synthetic construct
  misc_feature 1..20: note = C9Orf72 CTCN PAM targeting sequence
  source 1..20: mol_type = other RNA
gttaattcccttaattttcc

SEQ ID NO: 18835 - RNA, 20 nt, synthetic construct
  misc_feature 1..20: note = C9Orf72 CTCN PAM targeting sequence
  source 1..20: mol_type = other RNA
ccatatccctacacaaaaag

SEQ ID NO: 18836 - RNA, 20 nt, synthetic construct
  misc_feature 1..20: note = C9Orf72 CTCN PAM targeting sequence
  source 1..20: mol_type = other RNA
atatccctacacaaaaagaa

SEQ ID NO: 18837 - RNA, 20 nt, synthetic construct
  misc_feature 1..20: note = C9Orf72 CTCN PAM targeting sequence
  source 1..20: mol_type = other RNA
ataattatttgttgggtgac

SEQ ID NO: 18838 - RNA, 20 nt, synthetic construct
  misc_feature 1..20: note = C9Orf72 CTCN PAM targeting sequence
  source 1..20: mol_type = other RNA
ctcacaggcgaggtctggtg

SEQ ID NO: 18839 - RNA, 20 nt, synthetic construct
  misc_feature 1..20: note = C9Orf72 CTCN PAM targeting sequence
  source 1..20: mol_type = other RNA
cacaggcgaggtctggtgag

SEQ ID NO: 18840 - RNA, 20 nt, synthetic construct
  misc_feature 1..20: note = C9Orf72 CTCN PAM targeting sequence
  source 1..20: mol_type = other RNA
caggcgaggtctggtgagcc

SEQ ID NO: 18841 - RNA, 20 nt, synthetic construct
  misc_feature 1..20: note = C9Orf72 CTCN PAM targeting sequence
  source 1..20: mol_type = other RNA
cctgtgagagagccaggcta

SEQ ID NO: 18842 - RNA, 20 nt, synthetic construct
  misc_feature 1..20: note = C9Orf72 CTCN PAM targeting sequence
  source 1..20: mol_type = other RNA
ccagacctcgcctgtgagag

SEQ ID NO: 18843 - RNA, 20 nt, synthetic construct
  misc_feature 1..20: note = C9Orf72 CTCN PAM targeting sequence
  source 1..20: mol_type = other RNA
tatccataaagggctgataa

SEQ ID NO: 18844 - RNA, 20 nt, synthetic construct
  misc_feature 1..20: note = C9Orf72 CTCN PAM targeting sequence
  source 1..20: mol_type = other RNA
aaatgatatcctatatacag

SEQ ID NO: 18845 - RNA, 20 nt, synthetic construct
  misc_feature 1..20: note = C9Orf72 CTCN PAM targeting sequence
  source 1..20: mol_type = other RNA
aagcatatcacaatttttat

SEQ ID NO: 18846 - RNA, 20 nt, synthetic construct
  misc_feature 1..20: note = C9Orf72 CTCN PAM targeting sequence
  source 1..20: mol_type = other RNA
tactgccacccatggatatg

SEQ ID NO: 18847 - RNA, 20 nt, synthetic construct
  misc_feature 1..20: note = C9Orf72 CTCN PAM targeting sequence
  source 1..20: mol_type = other RNA
cctattccctatgagcattt

SEQ ID NO: 18848 - RNA, 20 nt, synthetic construct
  misc_feature 1..20: note = C9Orf72 CTCN PAM targeting sequence
  source 1..20: mol_type = other RNA
tattccctatgagcatttaa

SEQ ID NO: 18849 - RNA, 20 nt, synthetic construct
  misc_feature 1..20: note = C9Orf72 CTCN PAM targeting sequence
  source 1..20: mol_type = other RNA
tagggaataggagagacctg

SEQ ID NO: 18850 - RNA, 20 nt, synthetic construct
  misc_feature 1..20: note = C9Orf72 CTCN PAM targeting sequence
  source 1..20: mol_type = other RNA
taaatgctcatagggaatag

SEQ ID NO: 18851 - RNA, 20 nt, synthetic construct
  misc_feature 1..20: note = C9Orf72 CTCN PAM targeting sequence
  source 1..20: mol_type = other RNA
cagaacttattgcttagtag

SEQ ID NO: 18852 - RNA, 20 nt, synthetic construct
  misc_feature 1..20: note = C9Orf72 CTCN PAM targeting sequence
  source 1..20: mol_type = other RNA
actaagcaataagttctgtg

SEQ ID NO: 18853 - RNA, 20 nt, synthetic construct
  misc_feature 1..20: note = C9Orf72 CTCN PAM targeting sequence
  source 1..20: mol_type = other RNA
ctactaagcaataagttctg

SEQ ID NO: 18854 - RNA, 20 nt, synthetic construct
  misc_feature 1..20: note = C9Orf72 CTCN PAM targeting sequence
  source 1..20: mol_type = other RNA
cctgcggcaactacagttat

SEQ ID NO: 18855 - RNA, 20 nt, synthetic construct
  misc_feature 1..20: note = C9Orf72 CTCN PAM targeting sequence
  source 1..20: mol_type = other RNA
tcccctgcggcaactacagt

SEQ ID NO: 18856 - RNA, 20 nt, synthetic construct
  misc_feature 1..20: note = C9Orf72 CTCN PAM targeting sequence
  source 1..20: mol_type = other RNA
cctcccctgcggcaactaca

SEQ ID NO: 18857 - RNA, 20 nt, synthetic construct
  misc_feature 1..20: note = C9Orf72 CTCN PAM targeting sequence
  source 1..20: mol_type = other RNA
tctcctcccctgcggcaact

SEQ ID NO: 18858 - RNA, 20 nt, synthetic construct
  misc_feature 1..20: note = C9Orf72 CTCN PAM targeting sequence
  source 1..20: mol_type = other RNA
tgtcatgctcctctcctccc

SEQ ID NO: 18859 - RNA, 20 nt, synthetic construct
  misc_feature 1..20: note = C9Orf72 CTCN PAM targeting sequence
  source 1..20: mol_type = other RNA
gcctcatgtcatgctcctct

SEQ ID NO: 18860 - RNA, 20 nt, synthetic construct
  misc_feature 1..20: note = C9Orf72 CTCN PAM targeting sequence
  source 1..20: mol_type = other RNA
atcagggtcatcattaagag

SEQ ID NO: 18861 - RNA, 20 nt, synthetic construct
  misc_feature 1..20: note = C9Orf72 CTCN PAM targeting sequence
  source 1..20: mol_type = other RNA
taatgatgaccctgatagag

SEQ ID NO: 18862 - RNA, 20 nt, synthetic construct
  misc_feature 1..20: note = C9Orf72 CTCN PAM targeting sequence
  source 1..20: mol_type = other RNA
tctcttaatgatgaccctga

SEQ ID NO: 18863 - RNA, 20 nt, synthetic construct
  misc_feature 1..20: note = C9Orf72 CTCN PAM targeting sequence
  source 1..20: mol_type = other RNA
tttggggccagcttgtcttc

SEQ ID NO: 18864 - RNA, 20 nt, synthetic construct
  misc_feature 1..20: note = C9Orf72 CTCN PAM targeting sequence
  source 1..20: mol_type = other RNA
gcattggggtcagcctcatt

SEQ ID NO: 18865 - RNA, 20 nt, synthetic construct
  misc_feature 1..20: note = C9Orf72 CTCN PAM targeting sequence
  source 1..20: mol_type = other RNA
ctgcctcagcattggggtca

SEQ ID NO: 18866 - RNA, 20 nt, synthetic construct
  misc_feature 1..20: note = C9Orf72 CTCN PAM targeting sequence
  source 1..20: mol_type = other RNA
ttctcactgcctcagcattg

SEQ ID NO: 18867 - RNA, 20 nt, synthetic construct
  misc_feature 1..20: note = C9Orf72 CTCN PAM targeting sequence
  source 1..20: mol_type = other RNA
ggcaactagatgtttcactc

SEQ ID NO: 18868 - RNA, 20 nt, synthetic construct
  misc_feature 1..20: note = C9Orf72 CTCN PAM targeting sequence
  source 1..20: mol_type = other RNA
gacaaacgcagtcacctctg

SEQ ID NO: 18869 - RNA, 20 nt, synthetic construct
  misc_feature 1..20: note = C9Orf72 CTCN PAM targeting sequence
  source 1..20: mol_type = other RNA
gcatgccccatgggaagtac

SEQ ID NO: 18870 - RNA, 20 nt, synthetic construct
  misc_feature 1..20: note = C9Orf72 CTCN PAM targeting sequence
  source 1..20: mol_type = other RNA
ctactgggctcaatcgccta

SEQ ID NO: 18871 - RNA, 20 nt, synthetic construct
  misc_feature 1..20: note = C9Orf72 CTCN PAM targeting sequence
  source 1..20: mol_type = other RNA
actgggctcaatcgcctaat

SEQ ID NO: 18872 - RNA, 20 nt, synthetic construct
  misc_feature 1..20: note = C9Orf72 CTCN PAM targeting sequence
  source 1..20: mol_type = other RNA
atcgcctaatgaccctacaa

SEQ ID NO: 18873 - RNA, 20 nt, synthetic construct
  misc_feature 1..20: note = C9Orf72 CTCN PAM targeting sequence
  source 1..20: mol_type = other RNA
attcttgaaagtacattgtt

SEQ ID NO: 18874 - RNA, 20 nt, synthetic construct
  misc_feature 1..20: note = C9Orf72 CTCN PAM targeting sequence
  source 1..20: mol_type = other RNA
cgtcctgattcgaaacttgt

SEQ ID NO: 18875 - RNA, 20 nt, synthetic construct
  misc_feature 1..20: note = C9Orf72 CTCN PAM targeting sequence
  source 1..20: mol_type = other RNA
tcctgattcgaaacttgtct

SEQ ID NO: 18876 - RNA, 20 nt, synthetic construct
  misc_feature 1..20: note = C9Orf72 CTCN PAM targeting sequence
  source 1..20: mol_type = other RNA
atgaaaagacaagtttcgaa

SEQ ID NO: 18877 - RNA, 20 nt, synthetic construct
  misc_feature 1..20: note = C9Orf72 CTCN PAM targeting sequence
  source 1..20: mol_type = other RNA
ccatgaaaagacaagtttcg

SEQ ID NO: 18878 - RNA, 20 nt, synthetic construct
  misc_feature 1..20: note = C9Orf72 CTCN PAM targeting sequence
  source 1..20: mol_type = other RNA
gctgaatcacagctatatcg

SEQ ID NO: 18879 - RNA, 20 nt, synthetic construct
  misc_feature 1..20: note = C9Orf72 CTCN PAM targeting sequence
  source 1..20: mol_type = other RNA
tctccattttgccaaattct

SEQ ID NO: 18880 - RNA, 20 nt, synthetic construct
  misc_feature 1..20: note = C9Orf72 CTCN PAM targeting sequence
  source 1..20: mol_type = other RNA
attttgccaaattctgcctt

SEQ ID NO: 18881 - RNA, 20 nt, synthetic construct
  misc_feature 1..20: note = C9Orf72 CTCN PAM targeting sequence
  source 1..20: mol_type = other RNA
taatccacatagacaccaca

SEQ ID NO: 18882 - RNA, 20 nt, synthetic construct
  misc_feature 1..20: note = C9Orf72 CTCN PAM targeting sequence
  source 1..20: mol_type = other RNA
gttgtttatggaattgtgtg

SEQ ID NO: 18883 - RNA, 20 nt, synthetic construct
  misc_feature 1..20: note = C9Orf72 CTCN PAM targeting sequence
  source 1..20: mol_type = other RNA
ctctgaggaaagcctgaaca

SEQ ID NO: 18884 - RNA, 20 nt, synthetic construct
  misc_feature 1..20: note = C9Orf72 CTCN PAM targeting sequence
  source 1..20: mol_type = other RNA
gaggaaagcctgaacatgta

SEQ ID NO: 18885 - RNA, 20 nt, synthetic construct
  misc_feature 1..20: note = C9Orf72 CTCN PAM targeting sequence
  source 1..20: mol_type = other RNA
gagggagggctggttagcag

SEQ ID NO: 18886 - RNA, 20 nt, synthetic construct
  misc_feature 1..20: note = C9Orf72 CTCN PAM targeting sequence
  source 1..20: mol_type = other RNA
agccatgccagggaaataag

SEQ ID NO: 18887 - RNA, 20 nt, synthetic construct
  misc_feature 1..20: note = C9Orf72 CTCN PAM targeting sequence
  source 1..20: mol_type = other RNA
gcagttatgccagacgaatt

SEQ ID NO: 18888 - RNA, 20 nt, synthetic construct
  misc_feature 1..20: note = C9Orf72 CTCN PAM targeting sequence
  source 1..20: mol_type = other RNA
taaattcgtctggcataact

SEQ ID NO: 18889 - RNA, 20 nt, synthetic construct
  misc_feature 1..20: note = C9Orf72 CTCN PAM targeting sequence
  source 1..20: mol_type = other RNA
aaaatataatcagaaaattg

SEQ ID NO: 18890 - RNA, 20 nt, synthetic construct
  misc_feature 1..20: note = C9Orf72 CTCN PAM targeting sequence
  source 1..20: mol_type = other RNA
ggctttacagaacagaggta

SEQ ID NO: 18891 - RNA, 20 nt, synthetic construct
  misc_feature 1..20: note = C9Orf72 CTCN PAM targeting sequence
  source 1..20: mol_type = other RNA
gttctgtaaagccagaggta

SEQ ID NO: 18892 - RNA, 20 nt, synthetic construct
  misc_feature 1..20: note = C9Orf72 CTCN PAM targeting sequence
  source 1..20: mol_type = other RNA
gattagaagcattattgaat

SEQ ID NO: 18893 - RNA, 20 nt, synthetic construct
  misc_feature 1..20: note = C9Orf72 CTCN PAM targeting sequence
  source 1..20: mol_type = other RNA
catataatcactctgattag

SEQ ID NO: 18894 - RNA, 20 nt, synthetic construct
  misc_feature 1..20: note = C9Orf72 CTCN PAM targeting sequence
  source 1..20: mol_type = other RNA
ttgccatgtacacttgttac

SEQ ID NO: 18895 - RNA, 20 nt, synthetic construct
  misc_feature 1..20: note = C9Orf72 CTCN PAM targeting sequence
  source 1..20: mol_type = other RNA
atgctggctttacatgtgca

SEQ ID NO: 18896 - RNA, 20 nt, synthetic construct
  misc_feature 1..20: note = C9Orf72 CTCN PAM targeting sequence
  source 1..20: mol_type = other RNA
gcaggaggaggaagagtagc

SEQ ID NO: 18897 - RNA, 20 nt, synthetic construct
  misc_feature 1..20: note = C9Orf72 CTCN PAM targeting sequence
  source 1..20: mol_type = other RNA
tgcagagttacatttgattg

SEQ ID NO: 18898 - RNA, 20 nt, synthetic construct
  misc_feature 1..20: note = C9Orf72 CTCN PAM targeting sequence
  source 1..20: mol_type = other RNA
tcctgcagagttacatttga

SEQ ID NO: 18899 - RNA, 20 nt, synthetic construct
  misc_feature 1..20: note = C9Orf72 CTCN PAM targeting sequence
  source 1..20: mol_type = other RNA
tcctcctcctgcagagttac

SEQ ID NO: 18900 - RNA, 20 nt, synthetic construct
  misc_feature 1..20: note = C9Orf72 CTCN PAM targeting sequence
  source 1..20: mol_type = other RNA
gctactcttcctcctcctgc

SEQ ID NO: 18901 - RNA, 20 nt, synthetic construct
  misc_feature 1..20: note = C9Orf72 CTCN PAM targeting sequence
  source 1..20: mol_type = other RNA
ctgcaggggatgtcacgtct

SEQ ID NO: 18902 - RNA, 20 nt, synthetic construct
  misc_feature 1..20: note = C9Orf72 CTCN PAM targeting sequence
  source 1..20: mol_type = other RNA
gcaggggatgtcacgtctga

SEQ ID NO: 18903 - RNA, 20 nt, synthetic construct
  misc_feature 1..20: note = C9Orf72 CTCN PAM targeting sequence
  source 1..20: mol_type = other RNA
gacgtgacatcccctgcaga

SEQ ID NO: 18904 - RNA, 20 nt, synthetic construct
  misc_feature 1..20: note = C9Orf72 CTCN PAM targeting sequence
  source 1..20: mol_type = other RNA
gctgtgagaggtcagtggga

SEQ ID NO: 18905 - RNA, 20 nt, synthetic construct
  misc_feature 1..20: note = C9Orf72 CTCN PAM targeting sequence
  source 1..20: mol_type = other RNA
cagcagagctcagacgtgac

SEQ ID NO: 18906 - RNA, 20 nt, synthetic construct
  misc_feature 1..20: note = C9Orf72 CTCN PAM targeting sequence
  source 1..20: mol_type = other RNA
cacagcagagctcagacgtg

SEQ ID NO: 18907 - RNA, 20 nt, synthetic construct
  misc_feature 1..20: note = C9Orf72 CTCN PAM targeting sequence
  source 1..20: mol_type = other RNA
cactgacctctcacagcaga

SEQ ID NO: 18908 - RNA, 20 nt, synthetic construct
  misc_feature 1..20: note = C9Orf72 CTCN PAM targeting sequence
  source 1..20: mol_type = other RNA
tgcaatatttgggacatacc

SEQ ID NO: 18909 - RNA, 20 nt, synthetic construct
  misc_feature 1..20: note = C9Orf72 CTCN PAM targeting sequence
  source 1..20: mol_type = other RNA
caccattaggattgcctgtc

SEQ ID NO: 18910 - RNA, 20 nt, synthetic construct
  misc_feature 1..20: note = C9Orf72 CTCN PAM targeting sequence
  source 1..20: mol_type = other RNA
attccccatgttctgtaaac

SEQ ID NO: 18911 - RNA, 20 nt, synthetic construct
  misc_feature 1..20: note = C9Orf72 CTCN PAM targeting sequence
  source 1..20: mol_type = other RNA
tggggaaccctaagaattac

SEQ ID NO: 18912 - RNA, 20 nt, synthetic construct
  misc_feature 1..20: note = C9Orf72 CTCN PAM targeting sequence
  source 1..20: mol_type = other RNA
tcctgcctaaaacactcaga

SEQ ID NO: 18913 - RNA, 20 nt, synthetic construct
  misc_feature 1..20: note = C9Orf72 CTCN PAM targeting sequence
  source 1..20: mol_type = other RNA
tgcctaaaacactcagaaca

SEQ ID NO: 18914 - RNA, 20 nt, synthetic construct
  misc_feature 1..20: note = C9Orf72 CTCN PAM targeting sequence
  source 1..20: mol_type = other RNA
gaacatgcctgcttcttcaa

SEQ ID NO: 18915 - RNA, 20 nt, synthetic construct
  misc_feature 1..20: note = C9Orf72 CTCN PAM targeting sequence
  source 1..20: mol_type = other RNA
tcgagatcatgcactacaac

SEQ ID NO: 18916 - RNA, 20 nt, synthetic construct
  misc_feature 1..20: note = C9Orf72 CTCN PAM targeting sequence
  source 1..20: mol_type = other RNA
agatcatgcactacaactta

SEQ ID NO: 18917 - RNA, 20 nt, synthetic construct
  misc_feature 1..20: note = C9Orf72 CTCN PAM targeting sequence
  source 1..20: mol_type = other RNA
aggaggctgtggttgaagaa

SEQ ID NO: 18918 - RNA, 20 nt, synthetic construct
  misc_feature 1..20: note = C9Orf72 CTCN PAM targeting sequence
  source 1..20: mol_type = other RNA
ttcttcaggacctaggccag

SEQ ID NO: 18919 - RNA, 20 nt, synthetic construct
  misc_feature 1..20: note = C9Orf72 CTCN PAM targeting sequence
  source 1..20: mol_type = other RNA
gttccaatcagttgatatga

SEQ ID NO: 18920 - RNA, 20 nt, synthetic construct
  misc_feature 1..20: note = C9Orf72 CTCN PAM targeting sequence
  source 1..20: mol_type = other RNA
ctaaggctcagttccaatca

SEQ ID NO: 18921 - RNA, 20 nt, synthetic construct
  misc_feature 1..20: note = C9Orf72 CTCN PAM targeting sequence
  source 1..20: mol_type = other RNA
agagtagaaatgtttaaaca

SEQ ID NO: 18922 - RNA, 20 nt, synthetic construct
  misc_feature 1..20: note = C9Orf72 CTCN PAM targeting sequence
  source 1..20: mol_type = other RNA
agagtattttgaaagaaaat

SEQ ID NO: 18923 - RNA, 20 nt, synthetic construct
  misc_feature 1..20: note = C9Orf72 CTCN PAM targeting sequence
  source 1..20: mol_type = other RNA
aggaactgattccccagaaa

SEQ ID NO: 18924 - RNA, 20 nt, synthetic construct
  misc_feature 1..20: note = C9Orf72 CTCN PAM targeting sequence
  source 1..20: mol_type = other RNA
gcgattgatcctctaggaac

SEQ ID NO: 18925 - RNA, 20 nt, synthetic construct
  misc_feature 1..20: note = C9Orf72 CTCN PAM targeting sequence
  source 1..20: mol_type = other RNA
ctaggaaggttgtgtcaatt

SEQ ID NO: 18926 - RNA, 20 nt, synthetic construct
  misc_feature 1..20: note = C9Orf72 CTCN PAM targeting sequence
  source 1..20: mol_type = other RNA
aggaaggttgtgtcaattta

SEQ ID NO: 18927 - RNA, 20 nt, synthetic construct
  misc_feature 1..20: note = C9Orf72 CTCN PAM targeting sequence
  source 1..20: mol_type = other RNA
agaaaaaaaagatatacatt

SEQ ID NO: 18928 - RNA, 20 nt, synthetic construct
  misc_feature 1..20: note = C9Orf72 CTCN PAM targeting sequence
  source 1..20: mol_type = other RNA
tcagtgcacaacaaacacag

SEQ ID NO: 18929 - RNA, 20 nt, synthetic construct
  misc_feature 1..20: note = C9Orf72 CTCN PAM targeting sequence
  source 1..20: mol_type = other RNA
gtgcacaacaaacacaggag

SEQ ID NO: 18930 - RNA, 20 nt, synthetic construct
  misc_feature 1..20: note = C9Orf72 CTCN PAM targeting sequence
  source 1..20: mol_type = other RNA
tgtgtttgttgtgcactgag

SEQ ID NO: 18931 - RNA, 20 nt, synthetic construct
  misc_feature 1..20: note = C9Orf72 CTCN PAM targeting sequence
  source 1..20: mol_type = other RNA
aaatatccttttcttcagtt

SEQ ID NO: 18932 - RNA, 20 nt, synthetic construct
  misc_feature 1..20: note = C9Orf72 CTCN PAM targeting sequence
  source 1..20: mol_type = other RNA
tacttagtaagtgccagctc

SEQ ID NO: 18933 - RNA, 20 nt, synthetic construct
  misc_feature 1..20: note = C9Orf72 CTCN PAM targeting sequence
  source 1..20: mol_type = other RNA
aaaaagatgaagaatagagc

SEQ ID NO: 18934 - RNA, 20 nt, synthetic construct
  misc_feature 1..20: note = C9Orf72 CTCN PAM targeting sequence
  source 1..20: mol_type = other RNA
ttttgatttttctggatctc

SEQ ID NO: 18935 - RNA, 20 nt, synthetic construct
  misc_feature 1..20: note = C9Orf72 CTCN PAM targeting sequence
  source 1..20: mol_type = other RNA
ggtgacctagcaatcaaata

SEQ ID NO: 18936 - RNA, 20 nt, synthetic construct
  misc_feature 1..20: note = C9Orf72 CTCN PAM targeting sequence
  source 1..20: mol_type = other RNA
atgagacaggatgtttggct

SEQ ID NO: 18937 - RNA, 20 nt, synthetic construct
  misc_feature 1..20: note = C9Orf72 CTCN PAM targeting sequence
  source 1..20: mol_type = other RNA
ttgagttaatcatagacatt

SEQ ID NO: 18938 - RNA, 20 nt, synthetic construct
  misc_feature 1..20: note = C9Orf72 CTCN PAM targeting sequence
  source 1..20: mol_type = other RNA
tttttcagggaaaaaaaaaa

SEQ ID NO: 18939 - RNA, 20 nt, synthetic construct
  misc_feature 1..20: note = C9Orf72 CTCN PAM targeting sequence
  source 1..20: mol_type = other RNA
ttcgtcatttcacagttaac

SEQ ID NO: 18940 - RNA, 20 nt, synthetic construct
  misc_feature 1..20: note = C9Orf72 CTCN PAM targeting sequence
  source 1..20: mol_type = other RNA
tcctgctgaagatattcagg

SEQ ID NO: 18941 - RNA, 20 nt, synthetic construct
  misc_feature 1..20: note = C9Orf72 CTCN PAM targeting sequence
  source 1..20: mol_type = other RNA
tgctgaagatattcaggtat

SEQ ID NO: 18942 - RNA, 20 nt, synthetic construct
  misc_feature 1..20: note = C9Orf72 CTCN PAM targeting sequence
  source 1..20: mol_type = other RNA
aaacatcattgtcatataca

SEQ ID NO: 18943 - RNA, 20 nt, synthetic construct
  misc_feature 1..20: note = C9Orf72 CTCN PAM targeting sequence
  source 1..20: mol_type = other RNA
ggtgaacgttcagtaagtta

SEQ ID NO: 18944 - RNA, 20 nt, synthetic construct
  misc_feature 1..20: note = C9Orf72 CTCN PAM targeting sequence
  source 1..20: mol_type = other RNA
tctcaggtgaacgttcagta

SEQ ID NO: 18945 - RNA, 20 nt, synthetic construct
  misc_feature 1..20: note = C9Orf72 CTCN PAM targeting sequence
  source 1..20: mol_type = other RNA
gattttgccaggtgactctt

SEQ ID NO: 18946 - RNA, 20 nt, synthetic construct
  misc_feature 1..20: note = C9Orf72 CTCN PAM targeting sequence
  source 1..20: mol_type = other RNA
gatgtctcagattttgccag

SEQ ID NO: 18947 - RNA, 20 nt, synthetic construct
  misc_feature 1..20: note = C9Orf72 CTCN PAM targeting sequence
  source 1..20: mol_type = other RNA
tactactcagatgtctcaga

SEQ ID NO: 18948 - RNA, 20 nt, synthetic construct
  misc_feature 1..20: note = C9Orf72 CTCN PAM targeting sequence
  source 1..20: mol_type = other RNA
tagacattctacaggaaatg

SEQ ID NO: 18949 - RNA, 20 nt, synthetic construct
  misc_feature 1..20: note = C9Orf72 CTCN PAM targeting sequence
  source 1..20: mol_type = other RNA
aaagctatgttttctcgtag

SEQ ID NO: 18950 - RNA, 20 nt, synthetic construct
  misc_feature 1..20: note = C9Orf72 CTCN PAM targeting sequence
  source 1..20: mol_type = other RNA
tggggcaactcaaaagctat

SEQ ID NO: 18951 - RNA, 20 nt, synthetic construct
  misc_feature 1..20: note = C9Orf72 CTCN PAM targeting sequence
  source 1..20: mol_type = other RNA
ttccaatatttgaaggtgtg

SEQ ID NO: 18952 - RNA, 20 nt, synthetic construct
  misc_feature 1..20: note = C9Orf72 CTCN PAM targeting sequence
  source 1..20: mol_type = other RNA
ctttccaatatttgaaggtg

SEQ ID NO: 18953 - RNA, 20 nt, synthetic construct
  misc_feature 1..20: note = C9Orf72 CTCN PAM targeting sequence
  source 1..20: mol_type = other RNA
gcttgctgatcaagtcctat

SEQ ID NO: 18954 - RNA, 20 nt, synthetic construct
  misc_feature 1..20: note = C9Orf72 CTCN PAM targeting sequence
  source 1..20: mol_type = other RNA
aagcattggttcaggtactc

SEQ ID NO: 18955 - RNA, 20 nt, synthetic construct
  misc_feature 1..20: note = C9Orf72 CTCN PAM targeting sequence
  source 1..20: mol_type = other RNA
gctgggggaccctggcttct

SEQ ID NO: 18956 - RNA, 20 nt, synthetic construct
  misc_feature 1..20: note = C9Orf72 CTCN PAM targeting sequence
  source 1..20: mol_type = other RNA
gttccaggctgctcagctgg

SEQ ID NO: 18957 - RNA, 20 nt, synthetic construct
  misc_feature 1..20: note = C9Orf72 CTCN PAM targeting sequence
  source 1..20: mol_type = other RNA
tcagttccaggctgctcagc

SEQ ID NO: 18958 - RNA, 20 nt, synthetic construct
  misc_feature 1..20: note = C9Orf72 CTCN PAM targeting sequence
  source 1..20: mol_type = other RNA
caggcacagtcactgtattt

SEQ ID NO: 18959 - RNA, 20 nt, synthetic construct
  misc_feature 1..20: note = C9Orf72 CTCN PAM targeting sequence
  source 1..20: mol_type = other RNA
gacaatctcccaggcacagt

SEQ ID NO: 18960 - RNA, 20 nt, synthetic construct
  misc_feature 1..20: note = C9Orf72 CTCN PAM targeting sequence
  source 1..20: mol_type = other RNA
attcaggaggaaataaggta

SEQ ID NO: 18961 - RNA, 20 nt, synthetic construct
  misc_feature 1..20: note = C9Orf72 CTCN PAM targeting sequence
  source 1..20: mol_type = other RNA
ttctccttctcctcctccaa

SEQ ID NO: 18962 - RNA, 20 nt, synthetic construct
  misc_feature 1..20: note = C9Orf72 CTCN PAM targeting sequence
  source 1..20: mol_type = other RNA
ttctcctcctccaacttctt

SEQ ID NO: 18963 - RNA, 20 nt, synthetic construct
  misc_feature 1..20: note = C9Orf72 CTCN PAM targeting sequence
  source 1..20: mol_type = other RNA
tcctccaacttctttttaag

SEQ ID NO: 18964 - RNA, 20 nt, synthetic construct
  misc_feature 1..20: note = C9Orf72 CTCN PAM targeting sequence
  source 1..20: mol_type = other RNA
tccaacttctttttaaggat

SEQ ID NO: 18965 - RNA, 20 nt, synthetic construct
  misc_feature 1..20: note = C9Orf72 CTCN PAM targeting sequence
  source 1..20: mol_type = other RNA
aacttctttttaaggattgt

SEQ ID NO: 18966 - RNA, 20 nt, synthetic construct
  misc_feature 1..20: note = C9Orf72 CTCN PAM targeting sequence
  source 1..20: mol_type = other RNA
gttggactggtagcctcgga

SEQ ID NO: 18967 - RNA, 20 nt, synthetic construct
  misc_feature 1..20: note = C9Orf72 CTCN PAM targeting sequence
  source 1..20: mol_type = other RNA
tgctcttttctgtggccatt

SEQ ID NO: 18968 - RNA, 20 nt, synthetic construct
  misc_feature 1..20: note = C9Orf72 CTCN PAM targeting sequence
  source 1..20: mol_type = other RNA
tttctgtggccattttgaaa

SEQ ID NO: 18969 - RNA, 20 nt, synthetic construct
  misc_feature 1..20: note = C9Orf72 CTCN PAM targeting sequence
  source 1..20: mol_type = other RNA
ttcaaaatggccacagaaaa

SEQ ID NO: 18970 - RNA, 20 nt, synthetic construct
  misc_feature 1..20: note = C9Orf72 CTCN PAM targeting sequence
  source 1..20: mol_type = other RNA
taaagtaatgaaatactatt

SEQ ID NO: 18971 - RNA, 20 nt, synthetic construct
  misc_feature 1..20: note = C9Orf72 CTCN PAM targeting sequence
  source 1..20: mol_type = other RNA
tcctctcgcacctctatcta

SEQ ID NO: 18972 - RNA, 20 nt, synthetic construct
  misc_feature 1..20: note = C9Orf72 CTCN PAM targeting sequence
  source 1..20: mol_type = other RNA
cgcacctctatctaccccat

SEQ ID NO: 18973 - RNA, 20 nt, synthetic construct
  misc_feature 1..20: note = C9Orf72 CTCN PAM targeting sequence
  source 1..20: mol_type = other RNA
cacctctatctaccccattt

SEQ ID NO: 18974 - RNA, 20 nt, synthetic construct
  misc_feature 1..20: note = C9Orf72 CTCN PAM targeting sequence
  source 1..20: mol_type = other RNA
atctaccccatttcagaatc

SEQ ID NO: 18975 - RNA, 20 nt, synthetic construct
  misc_feature 1..20: note = C9Orf72 CTCN PAM targeting sequence
  source 1..20: mol_type = other RNA
gttaattcttgcttgaaggt

SEQ ID NO: 18976 - RNA, 20 nt, synthetic construct
  misc_feature 1..20: note = C9Orf72 CTCN PAM targeting sequence
  source 1..20: mol_type = other RNA
cttttatcataagactttct

SEQ ID NO: 18977 - RNA, 20 nt, synthetic construct
  misc_feature 1..20: note = C9Orf72 CTCN PAM targeting sequence
  source 1..20: mol_type = other RNA
tctaacttcttggctgaaat

SEQ ID NO: 18978 - RNA, 20 nt, synthetic construct
  misc_feature 1..20: note = C9Orf72 CTCN PAM targeting sequence
  source 1..20: mol_type = other RNA
ttttattgtctgatccttct

SEQ ID NO: 18979 - RNA, 20 nt, synthetic construct
  misc_feature 1..20: note = C9Orf72 CTCN PAM targeting sequence
  source 1..20: mol_type = other RNA
gctgatagttatttttacta

SEQ ID NO: 18980 - RNA, 20 nt, synthetic construct
  misc_feature 1..20: note = C9Orf72 CTCN PAM targeting sequence
  source 1..20: mol_type = other RNA
aggatagcaaacacttggca

SEQ ID NO: 18981 - RNA, 20 nt, synthetic construct
  misc_feature 1..20: note = C9Orf72 CTCN PAM targeting sequence
  source 1..20: mol_type = other RNA
ttcctccaggatagcaaaca

SEQ ID NO: 18982 - RNA, 20 nt, synthetic construct
  misc_feature 1..20: note = C9Orf72 CTCN PAM targeting sequence
  source 1..20: mol_type = other RNA
gccattctctttcctccagg

SEQ ID NO: 18983 - RNA, 20 nt, synthetic construct
  misc_feature 1..20: note = C9Orf72 CTCN PAM targeting sequence
  source 1..20: mol_type = other RNA
gctttctcagccattctctt

SEQ ID NO: 18984 - RNA, 20 nt, synthetic construct
  misc_feature 1..20: note = C9Orf72 CTCN PAM targeting sequence
  source 1..20: mol_type = other RNA
gctcggctttctcagccatt

SEQ ID NO: 18985 - RNA, 20 nt, synthetic construct
  misc_feature 1..20: note = C9Orf72 CTCN PAM targeting sequence
  source 1..20: mol_type = other RNA
actggaaaaaaggcaagggc

SEQ ID NO: 18986 - RNA, 20 nt, synthetic construct
  misc_feature 1..20: note = C9Orf72 CTCN PAM targeting sequence
  source 1..20: mol_type = other RNA
catcagtatgacagaaaaga

SEQ ID NO: 18987 - RNA, 20 nt, synthetic construct
  misc_feature 1..20: note = C9Orf72 CTCN PAM targeting sequence
  source 1..20: mol_type = other RNA
cattttatattgtcattctt

SEQ ID NO: 18988 - RNA, 20 nt, synthetic construct
  misc_feature 1..20: note = C9Orf72 CTCN PAM targeting sequence
  source 1..20: mol_type = other RNA
actcacattttatattgtca

SEQ ID NO: 18989 - RNA, 20 nt, synthetic construct
  misc_feature 1..20: note = C9Orf72 CTCN PAM targeting sequence
  source 1..20: mol_type = other RNA
tataccttacactccactca

SEQ ID NO: 18990 - RNA, 20 nt, synthetic construct
  misc_feature 1..20: note = C9Orf72 CTCN PAM targeting sequence
  source 1..20: mol_type = other RNA
cagtaatgcacaaaggctcc

SEQ ID NO: 18991 - RNA, 20 nt, synthetic construct
  misc_feature 1..20: note = C9Orf72 CTCN PAM targeting sequence
  source 1..20: mol_type = other RNA
cccttttacattcattttca

SEQ ID NO: 18992 - RNA, 20 nt, synthetic construct
  misc_feature 1..20: note = C9Orf72 CTCN PAM targeting sequence
  source 1..20: mol_type = other RNA
tttattttgttaatgatgcc

SEQ ID NO: 18993 - RNA, 20 nt, synthetic construct
  misc_feature 1..20: note = C9Orf72 CTCN PAM targeting sequence
  source 1..20: mol_type = other RNA
agaagtacccaaaggcatca

SEQ ID NO: 18994 - RNA, 20 nt, synthetic construct
  misc_feature 1..20: note = C9Orf72 CTCN PAM targeting sequence
  source 1..20: mol_type = other RNA
ttaccttcccaacggtggaa

SEQ ID NO: 18995 - RNA, 20 nt, synthetic construct
  misc_feature 1..20: note = C9Orf72 CTCN PAM targeting sequence
  source 1..20: mol_type = other RNA
agtgatttctgggtattata

SEQ ID NO: 18996 - RNA, 20 nt, synthetic construct
  misc_feature 1..20: note = C9Orf72 CTCN PAM targeting sequence
  source 1..20: mol_type = other RNA
atgtgtcgcattcctggctt

SEQ ID NO: 18997 - RNA, 20 nt, synthetic construct
  misc_feature 1..20: note = C9Orf72 CTCN PAM targeting sequence
  source 1..20: mol_type = other RNA
cttcttttatgttaaatgga

SEQ ID NO: 18998 - RNA, 20 nt, synthetic construct
  misc_feature 1..20: note = C9Orf72 CTCN PAM targeting sequence
  source 1..20: mol_type = other RNA
aaagttctgttgagttcgca

SEQ ID NO: 18999 - RNA, 20 nt, synthetic construct
  misc_feature 1..20: note = C9Orf72 CTCN PAM targeting sequence
  source 1..20: mol_type = other RNA
acagaacttttgagtttcca

SEQ ID NO: 19000 - RNA, 20 nt, synthetic construct
  misc_feature 1..20: note = C9Orf72 CTCN PAM targeting sequence
  source 1..20: mol_type = other RNA
cagagctgtgcagagccaag

SEQ ID NO: 19001 - RNA, 20 nt, synthetic construct
  misc_feature 1..20: note = C9Orf72 CTCN PAM targeting sequence
  source 1..20: mol_type = other RNA
gagctgtgcagagccaagct

SEQ ID NO: 19002 - RNA, 20 nt, synthetic construct
  misc_feature 1..20: note = C9Orf72 CTCN PAM targeting sequence
  source 1..20: mol_type = other RNA
gagagttttccctttgcgaa

SEQ ID NO: 19003 - RNA, 20 nt, synthetic construct
  misc_feature 1..20: note = C9Orf72 CTCN PAM targeting sequence
  source 1..20: mol_type = other RNA
gcacagctctgagagttttc

SEQ ID NO: 19004 - RNA, 20 nt, synthetic construct
  misc_feature 1..20: note = C9Orf72 CTCN PAM targeting sequence
  source 1..20: mol_type = other RNA
gacattgtcagtggatacca

SEQ ID NO: 19005 - RNA, 20 nt, synthetic construct
  misc_feature 1..20: note = C9Orf72 CTCN PAM targeting sequence
  source 1..20: mol_type = other RNA
ttcttcccctgggttgagga

SEQ ID NO: 19006 - RNA, 20 nt, synthetic construct
  misc_feature 1..20: note = C9Orf72 CTCN PAM targeting sequence
  source 1..20: mol_type = other RNA
acccaggggaagaaagaggc

SEQ ID NO: 19007 - RNA, 20 nt, synthetic construct
  misc_feature 1..20: note = C9Orf72 CTCN PAM targeting sequence
  source 1..20: mol_type = other RNA
tcaacccaggggaagaaaga

SEQ ID NO: 19008 - RNA, 20 nt, synthetic construct
  misc_feature 1..20: note = C9Orf72 CTCN PAM targeting sequence
  source 1..20: mol_type = other RNA
attacacttttgattcctcc

SEQ ID NO: 19009 - RNA, 20 nt, synthetic construct
  misc_feature 1..20: note = C9Orf72 CTCN PAM targeting sequence
  source 1..20: mol_type = other RNA
tccaaggaagctcaattaca

SEQ ID NO: 19010 - RNA, 20 nt, synthetic construct
  misc_feature 1..20: note = C9Orf72 CTCN PAM targeting sequence
  source 1..20: mol_type = other RNA
ttggggatcccacaggaaaa

SEQ ID NO: 19011 - RNA, 20 nt, synthetic construct
  misc_feature 1..20: note = C9Orf72 CTCN PAM targeting sequence
  source 1..20: mol_type = other RNA
gtcagcctcccctcagaggc

SEQ ID NO: 19012 - RNA, 20 nt, synthetic construct
  misc_feature 1..20: note = C9Orf72 CTCN PAM targeting sequence
  source 1..20: mol_type = other RNA
cctcagaggcaagacaactc

SEQ ID NO: 19013 - RNA, 20 nt, synthetic construct
  misc_feature 1..20: note = C9Orf72 CTCN PAM targeting sequence
  source 1..20: mol_type = other RNA
gaggcaagacaactcgctgg

SEQ ID NO: 19014 - RNA, 20 nt, synthetic construct
  misc_feature 1..20: note = C9Orf72 CTCN PAM targeting sequence
  source 1..20: mol_type = other RNA
gaggggaggctgactgagac

SEQ ID NO: 19015 - RNA, 20 nt, synthetic construct
  misc_feature 1..20: note = C9Orf72 CTCN PAM targeting sequence
  source 1..20: mol_type = other RNA
ctgggcaccatctggggacc

SEQ ID NO: 19016 - RNA, 20 nt, synthetic construct
  misc_feature 1..20: note = C9Orf72 CTCN PAM targeting sequence
  source 1..20: mol_type = other RNA
gagtagctactttgcttttg

SEQ ID NO: 19017 - RNA, 20 nt, synthetic construct
  misc_feature 1..20: note = C9Orf72 CTCN PAM targeting sequence
  source 1..20: mol_type = other RNA
gagaagtcagggtccccaga

SEQ ID NO: 19018 - RNA, 20 nt, synthetic construct
  misc_feature 1..20: note = C9Orf72 CTCN PAM targeting sequence
  source 1..20: mol_type = other RNA
ggaccatcctaagccacttg

SEQ ID NO: 19019 - RNA, 20 nt, synthetic construct
  misc_feature 1..20: note = C9Orf72 CTCN PAM targeting sequence
  source 1..20: mol_type = other RNA
gggacgtggaagcaggaact

SEQ ID NO: 19020 - RNA, 20 nt, synthetic construct
  misc_feature 1..20: note = C9Orf72 CTCN PAM targeting sequence
  source 1..20: mol_type = other RNA
agccgtatctgtgttgcgtc

SEQ ID NO: 19021 - RNA, 20 nt, synthetic construct
  misc_feature 1..20: note = C9Orf72 CTCN PAM targeting sequence
  source 1..20: mol_type = other RNA
gacgacgcaacacagatacg

SEQ ID NO: 19022 - RNA, 20 nt, synthetic construct
  misc_feature 1..20: note = C9Orf72 CTCN PAM targeting sequence
  source 1..20: mol_type = other RNA
ttttctacaatgaagaaagg

SEQ ID NO: 19023 - RNA, 20 nt, synthetic construct
  misc_feature 1..20: note = C9Orf72 CTCN PAM targeting sequence
  source 1..20: mol_type = other RNA
aagtttaaatcccaagtccc

SEQ ID NO: 19024 - RNA, 20 nt, synthetic construct
  misc_feature 1..20: note = C9Orf72 CTCN PAM targeting sequence
  source 1..20: mol_type = other RNA
aagccagaactccacgttca

SEQ ID NO: 19025 - RNA, 20 nt, synthetic construct
  misc_feature 1..20: note = C9Orf72 CTCN PAM targeting sequence
  source 1..20: mol_type = other RNA
acgttcattccggagtgaac

SEQ ID NO: 19026 - RNA, 20 nt, synthetic construct
  misc_feature 1..20: note = C9Orf72 CTCN PAM targeting sequence
  source 1..20: mol_type = other RNA
ggaatgaacgtggagttctg

SEQ ID NO: 19027 - RNA, 20 nt, synthetic construct
  misc_feature 1..20: note = C9Orf72 CTCN PAM targeting sequence
  source 1..20: mol_type = other RNA
ttatttgcatcttcgttctc

SEQ ID NO: 19028 - RNA, 20 nt, synthetic construct
  misc_feature 1..20: note = C9Orf72 CTCN PAM targeting sequence
  source 1..20: mol_type = other RNA
ttttggcgactagcctgccc

SEQ ID NO: 19029 - RNA, 20 nt, synthetic construct
  misc_feature 1..20: note = C9Orf72 CTCN PAM targeting sequence
  source 1..20: mol_type = other RNA
cgcccttggaaacttgtgga

SEQ ID NO: 19030 - RNA, 20 nt, synthetic construct
  misc_feature 1..20: note = C9Orf72 CTCN PAM targeting sequence
  source 1..20: mol_type = other RNA
gctttccgcctaccaaaggt

SEQ ID NO: 19031 - RNA, 20 nt, synthetic construct
  misc_feature 1..20: note = C9Orf72 CTCN PAM targeting sequence
  source 1..20: mol_type = other RNA
cactgccctagcagcggccc

SEQ ID NO: 19032 - RNA, 20 nt, synthetic construct
  misc_feature 1..20: note = C9Orf72 CTCN PAM targeting sequence
  source 1..20: mol_type = other RNA
agccaaaggcgttggggctg

SEQ ID NO: 19033 - RNA, 20 nt, synthetic construct
  misc_feature 1..20: note = C9Orf72 CTCN PAM targeting sequence
  source 1..20: mol_type = other RNA
ggaaccaaccactggacgct

SEQ ID NO: 19034 - RNA, 20 nt, synthetic construct
  misc_feature 1..20: note = C9Orf72 CTCN PAM targeting sequence
  source 1..20: mol_type = other RNA
ggattggggcggaacgcgct

SEQ ID NO: 19035 - RNA, 20 nt, synthetic construct
  misc_feature 1..20: note = C9Orf72 CTCN PAM targeting sequence
  source 1..20: mol_type = other RNA
aaagcagcaccttctcggat

SEQ ID NO: 19036 - RNA, 20 nt, synthetic construct
  misc_feature 1..20: note = C9Orf72 CTCN PAM targeting sequence
  source 1..20: mol_type = other RNA
gatttgagcctttgcggcgc

SEQ ID NO: 19037 - RNA, 20 nt, synthetic construct
  misc_feature 1..20: note = C9Orf72 CTCN PAM targeting sequence
  source 1..20: mol_type = other RNA
aatccgagaaggtgctgctt

SEQ ID NO: 19038 - RNA, 20 nt, synthetic construct
  misc_feature 1..20: note = C9Orf72 CTCN PAM targeting sequence
  source 1..20: mol_type = other RNA
gcccaggcgcgccgcaaagg

SEQ ID NO: 19039 - RNA, 20 nt, synthetic construct
  misc_feature 1..20: note = C9Orf72 CTCN PAM targeting sequence
  source 1..20: mol_type = other RNA
gatctcagcccaggcgcgcc

SEQ ID NO: 19040 - RNA, 20 nt, synthetic construct
  misc_feature 1..20: note = C9Orf72 CTCN PAM targeting sequence
  source 1..20: mol_type = other RNA
gctgctgcctgtggcccagg

SEQ ID NO: 19041 - RNA, 20 nt, synthetic construct
  misc_feature 1..20: note = C9Orf72 CTCN PAM targeting sequence
  source 1..20: mol_type = other RNA
gccctctaaccacaagggcg

SEQ ID NO: 19042 - RNA, 20 nt, synthetic construct
  misc_feature 1..20: note = C9Orf72 CTCN PAM targeting sequence
  source 1..20: mol_type = other RNA
aaccacaagggcggggtggg

SEQ ID NO: 19043 - RNA, 20 nt, synthetic construct
  misc_feature 1..20: note = C9Orf72 CTCN PAM targeting sequence
  source 1..20: mol_type = other RNA
ctggggtcgggctcctccac

SEQ ID NO: 19044 - RNA, 20 nt, synthetic construct
  misc_feature 1..20: note = C9Orf72 CTCN PAM targeting sequence
  source 1..20: mol_type = other RNA
tccactttcccagctgggat

SEQ ID NO: 19045 - RNA, 20 nt, synthetic construct
  misc_feature 1..20: note = C9Orf72 CTCN PAM targeting sequence
  source 1..20: mol_type = other RNA
actttcccagctgggatccc

SEQ ID NO: 19046 - RNA, 20 nt, synthetic construct
  misc_feature 1..20: note = C9Orf72 CTCN PAM targeting sequence
  source 1..20: mol_type = other RNA
ggcaggggatcccagctggg

SEQ ID NO: 19047 - RNA, 20 nt, synthetic construct
  misc_feature 1..20: note = C9Orf72 CTCN PAM targeting sequence
  source 1..20: mol_type = other RNA
ccggcccccacgccagctcc

SEQ ID NO: 19048 - RNA, 20 nt, synthetic construct
  misc_feature 1..20: note = C9Orf72 CTCN PAM targeting sequence
  source 1..20: mol_type = other RNA
ggtccccctccccggccccc

SEQ ID NO: 19049 - RNA, 20 nt, synthetic construct
  misc_feature 1..20: note = C9Orf72 CTCN PAM targeting sequence
  source 1..20: mol_type = other RNA
ccccaagccccgccagatgt

SEQ ID NO: 19050 - RNA, 20 nt, synthetic construct
  misc_feature 1..20: note = C9Orf72 CTCN PAM targeting sequence
  source 1..20: mol_type = other RNA
ccaagccccgccagatgttg

SEQ ID NO: 19051 - RNA, 20 nt, synthetic construct
  misc_feature 1..20: note = C9Orf72 CTCN PAM targeting sequence
  source 1..20: mol_type = other RNA
gcgtttcccctattgtttgc

SEQ ID NO: 19052 - RNA, 20 nt, synthetic construct
  misc_feature 1..20: note = C9Orf72 CTCN PAM targeting sequence
  source 1..20: mol_type = other RNA
gtcggctgcgtagagagatc

SEQ ID NO: 19053 - RNA, 20 nt, synthetic construct
  misc_feature 1..20: note = C9Orf72 CTCN PAM targeting sequence
  source 1..20: mol_type = other RNA
acgcagccgactgagatcgt

SEQ ID NO: 19054 - RNA, 20 nt, synthetic construct
  misc_feature 1..20: note = C9Orf72 CTCN PAM targeting sequence
  source 1..20: mol_type = other RNA
ctacgcagccgactgagatc

SEQ ID NO: 19055 - RNA, 20 nt, synthetic construct
  misc_feature 1..20: note = C9Orf72 CTCN PAM targeting sequence
  source 1..20: mol_type = other RNA
gtggggagggttaggggaga

SEQ ID NO: 19056 - RNA, 20 nt, synthetic construct
  misc_feature 1..20: note = C9Orf72 CTCN PAM targeting sequence
  source 1..20: mol_type = other RNA
ccacagagatctctctacgc

SEQ ID NO: 19057 - RNA, 20 nt, synthetic construct
  misc_feature 1..20: note = C9Orf72 CTCN PAM targeting sequence
  source 1..20: mol_type = other RNA
cctaaccctccccacagaga

SEQ ID NO: 19058 - RNA, 20 nt, synthetic construct
  misc_feature 1..20: note = C9Orf72 CTCN PAM targeting sequence
  source 1..20: mol_type = other RNA
cccctaaccctccccacaga

SEQ ID NO: 19059 - RNA, 20 nt, synthetic construct
  misc_feature 1..20: note = C9Orf72 CTCN PAM targeting sequence
  source 1..20: mol_type = other RNA
ttcctgaccctctcccctaa

SEQ ID NO: 19060 - RNA, 20 nt, synthetic construct
  misc_feature 1..20: note = C9Orf72 CTCN PAM targeting sequence
  source 1..20: mol_type = other RNA
cgctctttcctgaccctctc

SEQ ID NO: 19061 - RNA, 20 nt, synthetic construct
  misc_feature 1..20: note = C9Orf72 CTCN PAM targeting sequence
  source 1..20: mol_type = other RNA
ggatcccccccctcgcgctc

SEQ ID NO: 19062 - RNA, 20 nt, synthetic construct
  misc_feature 1..20: note = C9Orf72 CTCN PAM targeting sequence
  source 1..20: mol_type = other RNA
cgggatcccccccctcgcgc

SEQ ID NO: 19063 - RNA, 20 nt, synthetic construct
  misc_feature 1..20: note = C9Orf72 CTCN PAM targeting sequence
  source 1..20: mol_type = other RNA
aaatctctcgggatcccccc

SEQ ID NO: 19064 - RNA, 20 nt, synthetic construct
  misc_feature 1..20: note = C9Orf72 CTCN PAM targeting sequence
  source 1..20: mol_type = other RNA
ggtacttgccaggcaccagg

SEQ ID NO: 19065 - RNA, 20 nt, synthetic construct
  misc_feature 1..20: note = C9Orf72 CTCN PAM targeting sequence
  source 1..20: mol_type = other RNA
cagcaggggtctgaaggtgg

SEQ ID NO: 19066 - RNA, 20 nt, synthetic construct
  misc_feature 1..20: note = C9Orf72 CTCN PAM targeting sequence
  source 1..20: mol_type = other RNA
ctttccctgaactggggaag

SEQ ID NO: 19067 - RNA, 20 nt, synthetic construct
  misc_feature 1..20: note = C9Orf72 CTCN PAM targeting sequence
  source 1..20: mol_type = other RNA
ccacctccgtgaggcatcgt

SEQ ID NO: 19068 - RNA, 20 nt, synthetic construct
  misc_feature 1..20: note = C9Orf72 CTCN PAM targeting sequence
  source 1..20: mol_type = other RNA
gtgaggcatcgtcagccccg

SEQ ID NO: 19069 - RNA, 20 nt, synthetic construct
  misc_feature 1..20: note = C9Orf72 CTCN PAM targeting sequence
  source 1..20: mol_type = other RNA
cggaggtggggagcgtgtaa

SEQ ID NO: 19070 - RNA, 20 nt, synthetic construct
  misc_feature 1..20: note = C9Orf72 CTCN PAM targeting sequence
  source 1..20: mol_type = other RNA
gcttggggcagcgtagggga

SEQ ID NO: 19071 - RNA, 20 nt, synthetic construct
  misc_feature 1..20: note = C9Orf72 CTCN PAM targeting sequence
  source 1..20: mol_type = other RNA
tccctcaggatcaggacgcc

SEQ ID NO: 19072 - RNA, 20 nt, synthetic construct
  misc_feature 1..20: note = C9Orf72 CTCN PAM targeting sequence
  source 1..20: mol_type = other RNA
ctcaggatcaggacgcccaa

SEQ ID NO: 19073 - RNA, 20 nt, synthetic construct
  misc_feature 1..20: note = C9Orf72 CTCN PAM targeting sequence
  source 1..20: mol_type = other RNA
ggatcaggacgcccaagcgt

SEQ ID NO: 19074 - RNA, 20 nt, synthetic construct
  misc_feature 1..20: note = C9Orf72 CTCN PAM targeting sequence
  source 1..20: mol_type = other RNA
gagtcttgcaccccgaaaga

SEQ ID NO: 19075 - RNA, 20 nt, synthetic construct
  misc_feature 1..20: note = C9Orf72 CTCN PAM targeting sequence
  source 1..20: mol_type = other RNA
gagcccatccccagccgcgg

SEQ ID NO: 19076 - RNA, 20 nt, synthetic construct
  misc_feature 1..20: note = C9Orf72 CTCN PAM targeting sequence
  source 1..20: mol_type = other RNA
tgtgcacttcccggcaggaa

SEQ ID NO: 19077 - RNA, 20 nt, synthetic construct
  misc_feature 1..20: note = C9Orf72 CTCN PAM targeting sequence
  source 1..20: mol_type = other RNA
tcgtgtgcacttcccggcag

SEQ ID NO: 19078 - RNA, 20 nt, synthetic construct
  misc_feature 1..20: note = C9Orf72 CTCN PAM targeting sequence
  source 1..20: mol_type = other RNA
tcagacccctgccggcgcct

SEQ ID NO: 19079 - RNA, 20 nt, synthetic construct
  misc_feature 1..20: note = C9Orf72 CTCN PAM targeting sequence
  source 1..20: mol_type = other RNA
agccccggaagcccgtggcc

SEQ ID NO: 19080 - RNA, 20 nt, synthetic construct
  misc_feature 1..20: note = C9Orf72 CTCN PAM targeting sequence
  source 1..20: mol_type = other RNA
cgcaccttcttgcacccgcg

SEQ ID NO: 19081 - RNA, 20 nt, synthetic construct
  misc_feature 1..20: note = C9Orf72 CTCN PAM targeting sequence
  source 1..20: mol_type = other RNA
ccgcccgcccgggcgagatc

SEQ ID NO: 19082 - RNA, 20 nt, synthetic construct
  misc_feature 1..20: note = C9Orf72 CTCN PAM targeting sequence
  source 1..20: mol_type = other RNA
cccgggcgggcggcgaggtt

SEQ ID NO: 19083 - RNA, 20 nt, synthetic construct
  misc_feature 1..20: note = C9Orf72 CTCN PAM targeting sequence
  source 1..20: mol_type = other RNA
cgatctcgcccgggcgggcg

SEQ ID NO: 19084 - RNA, 20 nt, synthetic construct
  misc_feature 1..20: note = C9Orf72 CTCN PAM targeting sequence
  source 1..20: mol_type = other RNA
ctcccgatctcgcccgggcg

SEQ ID NO: 19085 - RNA, 20 nt, synthetic construct
  misc_feature 1..20: note = C9Orf72 CTCN PAM targeting sequence
  source 1..20: mol_type = other RNA
cctagcttggagcgggttct

SEQ ID NO: 19086 - RNA, 20 nt, synthetic construct
  misc_feature 1..20: note = C9Orf72 CTCN PAM targeting sequence
  source 1..20: mol_type = other RNA
aagctaggggaggcggcgca

SEQ ID NO: 19087 - RNA, 20 nt, synthetic construct
  misc_feature 1..20: note = C9Orf72 CTCN PAM targeting sequence
  source 1..20: mol_type = other RNA
ccgtggggttttacctccag

SEQ ID NO: 19088 - RNA, 20 nt, synthetic construct
  misc_feature 1..20: note = C9Orf72 CTCN PAM targeting sequence
  source 1..20: mol_type = other RNA
agcccagggcccggtcggct

SEQ ID NO: 19089 - RNA, 20 nt, synthetic construct
  misc_feature 1..20: note = C9Orf72 CTCN PAM targeting sequence
  source 1..20: mol_type = other RNA
cttcgccgggtcagctgcag

SEQ ID NO: 19090 - RNA, 20 nt, synthetic construct
  misc_feature 1..20: note = C9Orf72 CTCN PAM targeting sequence
  source 1..20: mol_type = other RNA
ccattttctttcgcgctggc

SEQ ID NO: 19091 - RNA, 20 nt, synthetic construct
  misc_feature 1..20: note = C9Orf72 CTCN PAM targeting sequence
  source 1..20: mol_type = other RNA
gggcaggtggggcgtcgctt

SEQ ID NO: 19092 - RNA, 20 nt, synthetic construct
  misc_feature 1..20: note = C9Orf72 CTCN PAM targeting sequence
  source 1..20: mol_type = other RNA
gccgccggtgcgcgaggtcc

SEQ ID NO: 19093 - RNA, 20 nt, synthetic construct
  misc_feature 1..20: note = C9Orf72 CTCN PAM targeting sequence
  source 1..20: mol_type = other RNA
cgcaccggcggcagagtccc

SEQ ID NO: 19094 - RNA, 20 nt, synthetic construct
  misc_feature 1..20: note = C9Orf72 CTCN PAM targeting sequence
  source 1..20: mol_type = other RNA
ccgggacctcgcgcaccggc

SEQ ID NO: 19095 - RNA, 20 nt, synthetic construct
  misc_feature 1..20: note = C9Orf72 CTCN PAM targeting sequence
  source 1..20: mol_type = other RNA
cccgtccgccggttggctcg

SEQ ID NO: 19096 - RNA, 20 nt, synthetic construct
  misc_feature 1..20: note = C9Orf72 CTCN PAM targeting sequence
  source 1..20: mol_type = other RNA
agctgcagccgccgtcgctc

SEQ ID NO: 19097 - RNA, 20 nt, synthetic construct
  misc_feature 1..20: note = C9Orf72 CTCN PAM targeting sequence
  source 1..20: mol_type = other RNA
ggagcagccccctcatgcac

SEQ ID NO: 19098 - RNA, 20 nt, synthetic construct
  misc_feature 1..20: note = C9Orf72 CTCN PAM targeting sequence
  source 1..20: mol_type = other RNA
ggagcgacggcggctgcagc

SEQ ID NO: 19099 - RNA, 20 nt, synthetic construct
  misc_feature 1..20: note = C9Orf72 CTCN PAM targeting sequence
  source 1..20: mol_type = other RNA
tgcacccagcgcgccgcgca

SEQ ID NO: 19100 - RNA, 20 nt, synthetic construct
  misc_feature 1..20: note = C9Orf72 CTCN PAM targeting sequence
  source 1..20: mol_type = other RNA
actgtctcgcggggacgccg

SEQ ID NO: 19101 - RNA, 20 nt, synthetic construct
  misc_feature 1..20: note = C9Orf72 CTCN PAM targeting sequence
  source 1..20: mol_type = other RNA
cggggacgccgagcggggac

SEQ ID NO: 19102 - RNA, 20 nt, synthetic construct
  misc_feature 1..20: note = C9Orf72 CTCN PAM targeting sequence
  source 1..20: mol_type = other RNA
gcgtccccgcgagacagtcg

SEQ ID NO: 19103 - RNA, 20 nt, synthetic construct
  misc_feature 1..20: note = C9Orf72 CTCN PAM targeting sequence
  source 1..20: mol_type = other RNA
acggtgctgccataccgcag

SEQ ID NO: 19104 - RNA, 20 nt, synthetic construct
  misc_feature 1..20: note = C9Orf72 CTCN PAM targeting sequence
  source 1..20: mol_type = other RNA
ccacggtgctgccataccgc

SEQ ID NO: 19105 - RNA, 20 nt, synthetic construct
  misc_feature 1..20: note = C9Orf72 CTCN PAM targeting sequence
  source 1..20: mol_type = other RNA
ggaaagagatgggacatgac

SEQ ID NO: 19106 - RNA, 20 nt, synthetic construct
  misc_feature 1..20: note = C9Orf72 CTCN PAM targeting sequence
  source 1..20: mol_type = other RNA
ttccggagggaagatgatcc

SEQ ID NO: 19107 - RNA, 20 nt, synthetic construct
  misc_feature 1..20: note = C9Orf72 CTCN PAM targeting sequence
  source 1..20: mol_type = other RNA
gggtccacaacggccacttc

SEQ ID NO: 19108 - RNA, 20 nt, synthetic construct
  misc_feature 1..20: note = C9Orf72 CTCN PAM targeting sequence
  source 1..20: mol_type = other RNA
aggtgccttggaagtggccg

SEQ ID NO: 19109 - RNA, 20 nt, synthetic construct
  misc_feature 1..20: note = C9Orf72 CTCN PAM targeting sequence
  source 1..20: mol_type = other RNA
ctaggtgccttggaagtggc

SEQ ID NO: 19110 - RNA, 20 nt, synthetic construct
  misc_feature 1..20: note = C9Orf72 CTCN PAM targeting sequence
  source 1..20: mol_type = other RNA
gtgtcaggcagttcatggta

SEQ ID NO: 19111 - RNA, 20 nt, synthetic construct
  misc_feature 1..20: note = C9Orf72 CTCN PAM targeting sequence
  source 1..20: mol_type = other RNA
gctctgtgtcaggcagttca

SEQ ID NO: 19112 - RNA, 20 nt, synthetic construct
  misc_feature 1..20: note = C9Orf72 CTCN PAM targeting sequence
  source 1..20: mol_type = other RNA
gattctagtggatttactag

SEQ ID NO: 19113 - RNA, 20 nt, synthetic construct
  misc_feature 1..20: note = C9Orf72 CTCN PAM targeting sequence
  source 1..20: mol_type = other RNA
cagtgtgttctagtaaatcc

SEQ ID NO: 19114 - RNA, 20 nt, synthetic construct
  misc_feature 1..20: note = C9Orf72 CTCN PAM targeting sequence
  source 1..20: mol_type = other RNA
acccacagcccgccactctc

SEQ ID NO: 19115 - RNA, 20 nt, synthetic construct
  misc_feature 1..20: note = C9Orf72 CTCN PAM targeting sequence
  source 1..20: mol_type = other RNA
ctacttgtgtggtcttggtc

SEQ ID NO: 19116 - RNA, 20 nt, synthetic construct
  misc_feature 1..20: note = C9Orf72 CTCN PAM targeting sequence
  source 1..20: mol_type = other RNA
acttgtgtggtcttggtcta

SEQ ID NO: 19117 - RNA, 20 nt, synthetic construct
  misc_feature 1..20: note = C9Orf72 CTCN PAM targeting sequence
  source 1..20: mol_type = other RNA
gtattctcctccgtaaattg

SEQ ID NO: 19118 - RNA, 20 nt, synthetic construct
  misc_feature 1..20: note = C9Orf72 CTCN PAM targeting sequence
  source 1..20: mol_type = other RNA
tccgtaaattggcggggagc

SEQ ID NO: 19119 - RNA, 20 nt, synthetic construct
  misc_feature 1..20: note = C9Orf72 CTCN PAM targeting sequence
  source 1..20: mol_type = other RNA
gtaaattggcggggagcaat

SEQ ID NO: 19120 - RNA, 20 nt, synthetic construct
  misc_feature 1..20: note = C9Orf72 CTCN PAM targeting sequence
  source 1..20: mol_type = other RNA
ccgccaatttacggaggaga

SEQ ID NO: 19121 - RNA, 20 nt, synthetic construct
  misc_feature 1..20: note = C9Orf72 CTCN PAM targeting sequence
  source 1..20: mol_type = other RNA
tatttgatttctgttactat

SEQ ID NO: 19122 - RNA, 20 nt, synthetic construct
  misc_feature 1..20: note = C9Orf72 CTCN PAM targeting sequence
  source 1..20: mol_type = other RNA
agaaggcaggaagctcatat

SEQ ID NO: 19123 - RNA, 20 nt, synthetic construct
  misc_feature 1..20: note = C9Orf72 CTCN PAM targeting sequence
  source 1..20: mol_type = other RNA
ttgaagtgtgtagtaagaat

SEQ ID NO: 19124 - RNA, 20 nt, synthetic construct
  misc_feature 1..20: note = C9Orf72 CTCN PAM targeting sequence
  source 1..20: mol_type = other RNA
atatatcctaatttctactt

SEQ ID NO: 19125 - RNA, 20 nt, synthetic construct
  misc_feature 1..20: note = C9Orf72 CTCN PAM targeting sequence
  source 1..20: mol_type = other RNA
tccaaaagaggtttctgcaa

SEQ ID NO: 19126 - RNA, 20 nt, synthetic construct
  misc_feature 1..20: note = C9Orf72 CTCN PAM targeting sequence
  source 1..20: mol_type = other RNA
aaaagaggtttctgcaacta

SEQ ID NO: 19127 - RNA, 20 nt, synthetic construct
  misc_feature 1..20: note = C9Orf72 CTCN PAM targeting sequence
  source 1..20: mol_type = other RNA
tttggaggagggatgttttc

SEQ ID NO: 19128 - RNA, 20 nt, synthetic construct
  misc_feature 1..20: note = C9Orf72 CTCN PAM targeting sequence
  source 1..20: mol_type = other RNA
cttcgtagttagttgcagaa

SEQ ID NO: 19129 - RNA, 20 nt, synthetic construct
  misc_feature 1..20: note = C9Orf72 CTCN PAM targeting sequence
  source 1..20: mol_type = other RNA
gatattgtaagaaacattta

SEQ ID NO: 19130 - RNA, 20 nt, synthetic construct
  misc_feature 1..20: note = C9Orf72 CTCN PAM targeting sequence
  source 1..20: mol_type = other RNA
aattctgtgtcacttttgtg

SEQ ID NO: 19131 - RNA, 20 nt, synthetic construct
  misc_feature 1..20: note = C9Orf72 CTCN PAM targeting sequence
  source 1..20: mol_type = other RNA
aatatgggaaaactgccaga

SEQ ID NO: 19132 - RNA, 20 nt, synthetic construct
  misc_feature 1..20: note = C9Orf72 CTCN PAM targeting sequence
  source 1..20: mol_type = other RNA
gtgatgaacagaaatattgc

SEQ ID NO: 19133 - RNA, 20 nt, synthetic construct
  misc_feature 1..20: note = C9Orf72 CTCN PAM targeting sequence
  source 1..20: mol_type = other RNA
tttccaaagtgccccagttt

SEQ ID NO: 19134 - RNA, 20 nt, synthetic construct
  misc_feature 1..20: note = C9Orf72 CTCN PAM targeting sequence
  source 1..20: mol_type = other RNA
taaaaactggggcactttgg

SEQ ID NO: 19135 - RNA, 20 nt, synthetic construct
  misc_feature 1..20: note = C9Orf72 CTCN PAM targeting sequence
  source 1..20: mol_type = other RNA
ggtgttcttcctcttaaaaa

SEQ ID NO: 19136 - RNA, 20 nt, synthetic construct
  misc_feature 1..20: note = C9Orf72 CTCN PAM targeting sequence
  source 1..20: mol_type = other RNA
gctgctatgggtctgtctga

SEQ ID NO: 19137 - RNA, 20 nt, synthetic construct
  misc_feature 1..20: note = C9Orf72 CTCN PAM targeting sequence
  source 1..20: mol_type = other RNA
gttacctcatcttataaaat

SEQ ID NO: 19138 - RNA, 20 nt, synthetic construct
  misc_feature 1..20: note = C9Orf72 CTCN PAM targeting sequence
  source 1..20: mol_type = other RNA
tcttataaaatgaggataat

SEQ ID NO: 19139 - RNA, 20 nt, synthetic construct
  misc_feature 1..20: note = C9Orf72 CTCN PAM targeting sequence
  source 1..20: mol_type = other RNA
ttttataagatgaggtaaca

SEQ ID NO: 19140 - RNA, 20 nt, synthetic construct
  misc_feature 1..20: note = C9Orf72 CTCN PAM targeting sequence
  source 1..20: mol_type = other RNA
agggtcaccacctatcattg

SEQ ID NO: 19141 - RNA, 20 nt, synthetic construct
  misc_feature 1..20: note = C9Orf72 CTCN PAM targeting sequence
  source 1..20: mol_type = other RNA
ctcatgagctcaagagcccc

SEQ ID NO: 19142 - RNA, 20 nt, synthetic construct
  misc_feature 1..20: note = C9Orf72 CTCN PAM targeting sequence
  source 1..20: mol_type = other RNA
tgagctcaagagcccccagc

SEQ ID NO: 19143 - RNA, 20 nt, synthetic construct
  misc_feature 1..20: note = C9Orf72 CTCN PAM targeting sequence
  source 1..20: mol_type = other RNA
tgagggaggggctacatgtc

SEQ ID NO: 19144 - RNA, 20 nt, synthetic construct
  misc_feature 1..20: note = C9Orf72 CTCN PAM targeting sequence
  source 1..20: mol_type = other RNA
agagcccccagcacgtgttc

SEQ ID NO: 19145 - RNA, 20 nt, synthetic construct
  misc_feature 1..20: note = C9Orf72 CTCN PAM targeting sequence
  source 1..20: mol_type = other RNA
tgagctcatgagggaggggc

SEQ ID NO: 19146 - RNA, 20 nt, synthetic construct
  misc_feature 1..20: note = C9Orf72 CTCN PAM targeting sequence
  source 1..20: mol_type = other RNA
cacacgcacaagcttcagtg

SEQ ID NO: 19147 - RNA, 20 nt, synthetic construct
  misc_feature 1..20: note = C9Orf72 CTCN PAM targeting sequence
  source 1..20: mol_type = other RNA
tggaaagtaggaacagaaag

SEQ ID NO: 19148 - RNA, 20 nt, synthetic construct
  misc_feature 1..20: note = C9Orf72 CTCN PAM targeting sequence
  source 1..20: mol_type = other RNA
ttctgttcctactttccagg

SEQ ID NO: 19149 - RNA, 20 nt, synthetic construct
  misc_feature 1..20: note = C9Orf72 CTCN PAM targeting sequence
  source 1..20: mol_type = other RNA
tactttatacatttcccata

SEQ ID NO: 19150 - RNA, 20 nt, synthetic construct
  misc_feature 1..20: note = C9Orf72 CTCN PAM targeting sequence
  source 1..20: mol_type = other RNA
tatgggaaatgtataaagta

SEQ ID NO: 19151 - RNA, 20 nt, synthetic construct
  misc_feature 1..20: note = C9Orf72 CTCN PAM targeting sequence
  source 1..20: mol_type = other RNA
tggaattttttttttttcat

SEQ ID NO: 19152 - RNA, 20 nt, synthetic construct
  misc_feature 1..20: note = C9Orf72 CTCN PAM targeting sequence
  source 1..20: mol_type = other RNA
aaggggaagctgtaatgaag

SEQ ID NO: 19153 - RNA, 20 nt, synthetic construct
  misc_feature 1..20: note = C9Orf72 CTCN PAM targeting sequence
  source 1..20: mol_type = other RNA
attgtcatctgtctattaca

SEQ ID NO: 19154 - RNA, 20 nt, synthetic construct
  misc_feature 1..20: note = C9Orf72 CTCN PAM targeting sequence
  source 1..20: mol_type = other RNA
gggcagcagtgctcagagtc

SEQ ID NO: 19155 - RNA, 20 nt, synthetic construct
  misc_feature 1..20: note = C9Orf72 CTCN PAM targeting sequence
  source 1..20: mol_type = other RNA
gagtccaagggctactcaaa

SEQ ID NO: 19156 - RNA, 20 nt, synthetic construct
  misc_feature 1..20: note = C9Orf72 CTCN PAM targeting sequence
  source 1..20: mol_type = other RNA
gagcactgctgcccagagca

SEQ ID NO: 19157 - RNA, 20 nt, synthetic construct
  misc_feature 1..20: note = C9Orf72 CTCN PAM targeting sequence
  source 1..20: mol_type = other RNA
aagtaaatttggtaagaggc

SEQ ID NO: 19158 - RNA, 20 nt, synthetic construct
  misc_feature 1..20: note = C9Orf72 CTCN PAM targeting sequence
  source 1..20: mol_type = other RNA
taccaaatttactttgagta

SEQ ID NO: 19159 - RNA, 20 nt, synthetic construct
  misc_feature 1..20: note = C9Orf72 CTCN PAM targeting sequence
  source 1..20: mol_type = other RNA
gccaaaatgaatagaaatag

SEQ ID NO: 19160 - RNA, 20 nt, synthetic construct
  misc_feature 1..20: note = C9Orf72 CTCN PAM targeting sequence
  source 1..20: mol_type = other RNA
tgtgtgtgctaattgtaatt

SEQ ID NO: 19161 - RNA, 20 nt, synthetic construct
  misc_feature 1..20: note = C9Orf72 CTCN PAM targeting sequence
  source 1..20: mol_type = other RNA
agagtccctttcatcctaag

SEQ ID NO: 19162 - RNA, 20 nt, synthetic construct
  misc_feature 1..20: note = C9Orf72 CTCN PAM targeting sequence
  source 1..20: mol_type = other RNA
tgaggatgtctgctgtttgt

SEQ ID NO: 19163 - RNA, 20 nt, synthetic construct
  misc_feature 1..20: note = C9Orf72 CTCN PAM targeting sequence
  source 1..20: mol_type = other RNA
cattgcttaggatgaaaggg

SEQ ID NO: 19164 - RNA, 20 nt, synthetic construct
  misc_feature 1..20: note = C9Orf72 CTCN PAM targeting sequence
  source 1..20: mol_type = other RNA
ttacctgcttctgttttgtt

SEQ ID NO: 19165 - RNA, 20 nt, synthetic construct
  misc_feature 1..20: note = C9Orf72 CTCN PAM targeting sequence
  source 1..20: mol_type = other RNA
atacctgtgactatttaagg

SEQ ID NO: 19166 - RNA, 20 nt, synthetic construct
  misc_feature 1..20: note = C9Orf72 CTCN PAM targeting sequence
  source 1..20: mol_type = other RNA
atgcttatgggagcttctgt

SEQ ID NO: 19167 - RNA, 20 nt, synthetic construct
  misc_feature 1..20: note = C9Orf72 CTCN PAM targeting sequence
  source 1..20: mol_type = other RNA
cataagcattgagacaattt

SEQ ID NO: 19168 - RNA, 20 nt, synthetic construct
  misc_feature 1..20: note = C9Orf72 CTCN PAM targeting sequence
  source 1..20: mol_type = other RNA
gggtactgaaaagaaacaaa

SEQ ID NO: 19169 - RNA, 20 nt, synthetic construct
  misc_feature 1..20: note = C9Orf72 CTCN PAM targeting sequence
  source 1..20: mol_type = other RNA
gtgcttaggggaagccatgc

SEQ ID NO: 19170 - RNA, 20 nt, synthetic construct
  misc_feature 1..20: note = C9Orf72 CTCN PAM targeting sequence
  source 1..20: mol_type = other RNA
aaaatgtgtgtgtatatata

SEQ ID NO: 19171 - RNA, 20 nt, synthetic construct
  misc_feature 1..20: note = C9Orf72 CTCN PAM targeting sequence
  source 1..20: mol_type = other RNA
acatttataatgacactaaa

SEQ ID NO: 19172 - RNA, 20 nt, synthetic construct
  misc_feature 1..20: note = C9Orf72 CTCN PAM targeting sequence
  source 1..20: mol_type = other RNA
gaaatgcacattacatcaat

SEQ ID NO: 19173 - RNA, 20 nt, synthetic construct
  misc_feature 1..20: note = C9Orf72 CTCN PAM targeting sequence
  source 1..20: mol_type = other RNA
gacctttttatgccttagtt

SEQ ID NO: 19174 - RNA, 20 nt, synthetic construct
  misc_feature 1..20: note = C9Orf72 CTCN PAM targeting sequence
  source 1..20: mol_type = other RNA
tgaactctgacctttttatg

SEQ ID NO: 19175 - RNA, 20 nt, synthetic construct
  misc_feature 1..20: note = C9Orf72 CTCN PAM targeting sequence
  source 1..20: mol_type = other RNA
attcctatagaccagaaagc

SEQ ID NO: 19176 - RNA, 20 nt, synthetic construct
  misc_feature 1..20: note = C9Orf72 CTCN PAM targeting sequence
  source 1..20: mol_type = other RNA
ctctattcctatagaccaga

SEQ ID NO: 19177 - RNA, 20 nt, synthetic construct
  misc_feature 1..20: note = C9Orf72 CTCN PAM targeting sequence
  source 1..20: mol_type = other RNA
tttcaataatttttttttaa

SEQ ID NO: 19178 - RNA, 20 nt, synthetic construct
  misc_feature 1..20: note = C9Orf72 CTCN PAM targeting sequence
  source 1..20: mol_type = other RNA
ttcttcctgctcttagaatc

SEQ ID NO: 19179 - RNA, 20 nt, synthetic construct
  misc_feature 1..20: note = C9Orf72 CTCN PAM targeting sequence
  source 1..20: mol_type = other RNA
tagaatctgttttgtttata

SEQ ID NO: 19180 - RNA, 20 nt, synthetic construct
  misc_feature 1..20: note = C9Orf72 CTCN PAM targeting sequence
  source 1..20: mol_type = other RNA
ttcatatctatcagatggta

SEQ ID NO: 19181 - RNA, 20 nt, synthetic construct
  misc_feature 1..20: note = C9Orf72 CTCN PAM targeting sequence
  source 1..20: mol_type = other RNA
accacatgggtatttttaaa

SEQ ID NO: 19182 - RNA, 20 nt, synthetic construct
  misc_feature 1..20: note = C9Orf72 CTCN PAM targeting sequence
  source 1..20: mol_type = other RNA
ctgcagcctcaaccacatgg

SEQ ID NO: 19183 - RNA, 20 nt, synthetic construct
  misc_feature 1..20: note = C9Orf72 CTCN PAM targeting sequence
  source 1..20: mol_type = other RNA
aacctgggcaatgagaccct

SEQ ID NO: 19184 - RNA, 20 nt, synthetic construct
  misc_feature 1..20: note = C9Orf72 CTCN PAM targeting sequence
  source 1..20: mol_type = other RNA
ttgcccaggttagagtgcag

SEQ ID NO: 19185 - RNA, 20 nt, synthetic construct
  misc_feature 1..20: note = C9Orf72 CTCN PAM targeting sequence
  source 1..20: mol_type = other RNA
aaaaaaaaaaaaaaaaatag

SEQ ID NO: 19186 - RNA, 20 nt, synthetic construct
  misc_feature 1..20: note = C9Orf72 CTCN PAM targeting sequence
  source 1..20: mol_type = other RNA
agagatgagcctgatgtttc

SEQ ID NO: 19187 - RNA, 20 nt, synthetic construct
  misc_feature 1..20: note = C9Orf72 CTCN PAM targeting sequence
  source 1..20: mol_type = other RNA
tgagaagaagggtcgcttat

SEQ ID NO: 19188 - RNA, 20 nt, synthetic construct
  misc_feature 1..20: note = C9Orf72 CTCN PAM targeting sequence
  source 1..20: mol_type = other RNA
tctcttgagaagaagggtcg

SEQ ID NO: 19189 - RNA, 20 nt, synthetic construct
  misc_feature 1..20: note = C9Orf72 CTCN PAM targeting sequence
  source 1..20: mol_type = other RNA
gtattctgagtaatggagag

SEQ ID NO: 19190 - RNA, 20 nt, synthetic construct
  misc_feature 1..20: note = C9Orf72 CTCN PAM targeting sequence
  source 1..20: mol_type = other RNA
gaatactgaggcagatcaca

SEQ ID NO: 19191 - RNA, 20 nt, synthetic construct
  misc_feature 1..20: note = C9Orf72 CTCN PAM targeting sequence
  source 1..20: mol_type = other RNA
attactcagaatactgaggc

SEQ ID NO: 19192 - RNA, 20 nt, synthetic construct
  misc_feature 1..20: note = C9Orf72 CTCN PAM targeting sequence
  source 1..20: mol_type = other RNA
ccattactcagaatactgag

SEQ ID NO: 19193 - RNA, 20 nt, synthetic construct
  misc_feature 1..20: note = C9Orf72 CTCN PAM targeting sequence
  source 1..20: mol_type = other RNA
tctccattactcagaatact

SEQ ID NO: 19194 - RNA, 20 nt, synthetic construct
  misc_feature 1..20: note = C9Orf72 CTCN PAM targeting sequence
  source 1..20: mol_type = other RNA
cactgtgaaacaggtcaact

SEQ ID NO: 19195 - RNA, 20 nt, synthetic construct
  misc_feature 1..20: note = C9Orf72 CTCN PAM targeting sequence
  source 1..20: mol_type = other RNA
ctgtgaaacaggtcaactta

SEQ ID NO: 19196 - RNA, 20 nt, synthetic construct
  misc_feature 1..20: note = C9Orf72 CTCN PAM targeting sequence
  source 1..20: mol_type = other RNA
tggcaactaaccctttttgg

SEQ ID NO: 19197 - RNA, 20 nt, synthetic construct
  misc_feature 1..20: note = C9Orf72 CTCN PAM targeting sequence
  source 1..20: mol_type = other RNA
ctgtaggattaatttggggg

SEQ ID NO: 19198 - RNA, 20 nt, synthetic construct
  misc_feature 1..20: note = C9Orf72 CTCN PAM targeting sequence
  source 1..20: mol_type = other RNA
acttgtgaaaggtgctaaag

SEQ ID NO: 19199 - RNA, 20 nt, synthetic construct
  misc_feature 1..20: note = C9Orf72 CTCN PAM targeting sequence
  source 1..20: mol_type = other RNA
atgggtttggaatgttgtgc

SEQ ID NO: 19200 - RNA, 20 nt, synthetic construct
  misc_feature 1..20: note = C9Orf72 CTCN PAM targeting sequence
  source 1..20: mol_type = other RNA
atctttctatgcctttctgt

SEQ ID NO: 19201 - RNA, 20 nt, synthetic construct
  misc_feature 1..20: note = C9Orf72 CTCN PAM targeting sequence
  source 1..20: mol_type = other RNA
tctctatctttctatgcctt

SEQ ID NO: 19202 - RNA, 20 nt, synthetic construct
  misc_feature 1..20: note = C9Orf72 CTCN PAM targeting sequence
  source 1..20: mol_type = other RNA
tggatgcttccaacgtgata

SEQ ID NO: 19203 - RNA, 20 nt, synthetic construct
  misc_feature 1..20: note = C9Orf72 CTCN PAM targeting sequence
  source 1..20: mol_type = other RNA
tctaaatagtaaaataatga

SEQ ID NO: 19204 - RNA, 20 nt, synthetic construct
  misc_feature 1..20: note = C9Orf72 CTCN PAM targeting sequence
  source 1..20: mol_type = other RNA
aagagactttctctctttga

SEQ ID NO: 19205 - RNA, 20 nt, synthetic construct
  misc_feature 1..20: note = C9Orf72 CTCN PAM targeting sequence
  source 1..20: mol_type = other RNA
ttgagatcttcattatttta

SEQ ID NO: 19206 - RNA, 20 nt, synthetic construct
  misc_feature 1..20: note = C9Orf72 CTCN PAM targeting sequence
  source 1..20: mol_type = other RNA
ctttgagaaacacagcttta

SEQ ID NO: 19207 - RNA, 20 nt, synthetic construct
  misc_feature 1..20: note = C9Orf72 CTCN PAM targeting sequence
  source 1..20: mol_type = other RNA
ttgagaaacacagctttact

SEQ ID NO: 19208 - RNA, 20 nt, synthetic construct
  misc_feature 1..20: note = C9Orf72 CTCN PAM targeting sequence
  source 1..20: mol_type = other RNA
aagagagaaagtctctttga

SEQ ID NO: 19209 - RNA, 20 nt, synthetic construct
  misc_feature 1..20: note = C9Orf72 CTCN PAM targeting sequence
  source 1..20: mol_type = other RNA
ccaacaaatcagtcattaat

SEQ ID NO: 19210 - RNA, 20 nt, synthetic construct
  misc_feature 1..20: note = C9Orf72 CTCN PAM targeting sequence
  source 1..20: mol_type = other RNA
ttagctctctttgaatgtct

SEQ ID NO: 19211 - RNA, 20 nt, synthetic construct
  misc_feature 1..20: note = C9Orf72 CTCN PAM targeting sequence
  source 1..20: mol_type = other RNA
ctttgaatgtctataggaaa

SEQ ID NO: 19212 - RNA, 20 nt, synthetic construct
  misc_feature 1..20: note = C9Orf72 CTCN PAM targeting sequence
  source 1..20: mol_type = other RNA
ttgaatgtctataggaaaga

SEQ ID NO: 19213 - RNA, 20 nt, synthetic construct
  misc_feature 1..20: note = C9Orf72 CTCN PAM targeting sequence
  source 1..20: mol_type = other RNA
ccaaatcaccctctaccctc

SEQ ID NO: 19214 - RNA, 20 nt, synthetic construct
  misc_feature 1..20: note = C9Orf72 CTCN PAM targeting sequence
  source 1..20: mol_type = other RNA
aaatcaccctctaccctcct

SEQ ID NO: 19215 - RNA, 20 nt, synthetic construct
  misc_feature 1..20: note = C9Orf72 CTCN PAM targeting sequence
  source 1..20: mol_type = other RNA
accctcctggcatagaaaat

SEQ ID NO: 19216 - RNA, 20 nt, synthetic construct
  misc_feature 1..20: note = C9Orf72 CTCN PAM targeting sequence
  source 1..20: mol_type = other RNA
tggcatagaaaataaacaag

SEQ ID NO: 19217 - RNA, 20 nt, synthetic construct
  misc_feature 1..20: note = C9Orf72 CTCN PAM targeting sequence
  source 1..20: mol_type = other RNA
ttccttaattatgatgtaaa

SEQ ID NO: 19218 - RNA, 20 nt, synthetic construct
  misc_feature 1..20: note = C9Orf72 CTCN PAM targeting sequence
  source 1..20: mol_type = other RNA
agctgttctaacgacacaga

SEQ ID NO: 19219 - RNA, 20 nt, synthetic construct
  misc_feature 1..20: note = C9Orf72 CTCN PAM targeting sequence
  source 1..20: mol_type = other RNA
agattccaattaggtttgct

SEQ ID NO: 19220 - RNA, 20 nt, synthetic construct
  misc_feature 1..20: note = C9Orf72 CTCN PAM targeting sequence
  source 1..20: mol_type = other RNA
atattaatttcctcttaaga

SEQ ID NO: 19221 - RNA, 20 nt, synthetic construct
  misc_feature 1..20: note = C9Orf72 CTCN PAM targeting sequence
  source 1..20: mol_type = other RNA
taagaagctacttcaccatt

SEQ ID NO: 19222 - RNA, 20 nt, synthetic construct
  misc_feature 1..20: note = C9Orf72 CTCN PAM targeting sequence
  source 1..20: mol_type = other RNA
ggctagcctcaattgcatga

SEQ ID NO: 19223 - RNA, 20 nt, synthetic construct
  misc_feature 1..20: note = C9Orf72 CTCN PAM targeting sequence
  source 1..20: mol_type = other RNA
attgcatgagtgtttcatgt

SEQ ID NO: 19224 - RNA, 20 nt, synthetic construct
  misc_feature 1..20: note = C9Orf72 CTCN PAM targeting sequence
  source 1..20: mol_type = other RNA
tgcaattgaggctagccaga

SEQ ID NO: 19225 - RNA, 20 nt, synthetic construct
  misc_feature 1..20: note = C9Orf72 CTCN PAM targeting sequence
  source 1..20: mol_type = other RNA
ttcatattacttactgtaca

SEQ ID NO: 19226 - RNA, 20 nt, synthetic construct
  misc_feature 1..20: note = C9Orf72 CTCN PAM targeting sequence
  source 1..20: mol_type = other RNA
aatgatgcttttcagaggga

SEQ ID NO: 19227 - RNA, 20 nt, synthetic construct
  misc_feature 1..20: note = C9Orf72 CTCN PAM targeting sequence
  source 1..20: mol_type = other RNA
gaaaagcatcattagaggct

SEQ ID NO: 19228 - RNA, 20 nt, synthetic construct
  misc_feature 1..20: note = C9Orf72 CTCN PAM targeting sequence
  source 1..20: mol_type = other RNA
gaaaagatttttggaaaagt

SEQ ID NO: 19229 - RNA, 20 nt, synthetic construct
  misc_feature 1..20: note = C9Orf72 CTCN PAM targeting sequence
  source 1..20: mol_type = other RNA
gcagagtctctgtagaaatg

SEQ ID NO: 19230 - RNA, 20 nt, synthetic construct
  misc_feature 1..20: note = C9Orf72 CTCN PAM targeting sequence
  source 1..20: mol_type = other RNA
gctgagcagtagacaagaag

SEQ ID NO: 19231 - RNA, 20 nt, synthetic construct
  misc_feature 1..20: note = C9Orf72 CTCN PAM targeting sequence
  source 1..20: mol_type = other RNA
gtagaaatgaatagataact

SEQ ID NO: 19232 - RNA, 20 nt, synthetic construct
  misc_feature 1..20: note = C9Orf72 CTCN PAM targeting sequence
  source 1..20: mol_type = other RNA
tccgtctttgtttctttctc

SEQ ID NO: 19233 - RNA, 20 nt, synthetic construct
  misc_feature 1..20: note = C9Orf72 CTCN PAM targeting sequence
  source 1..20: mol_type = other RNA
tctcttctctgttagaggat

SEQ ID NO: 19234 - RNA, 20 nt, synthetic construct
  misc_feature 1..20: note = C9Orf72 CTCN PAM targeting sequence
  source 1..20: mol_type = other RNA
tctctgttagaggatttatg

SEQ ID NO: 19235 - RNA, 20 nt, synthetic construct
  misc_feature 1..20: note = C9Orf72 CTCN PAM targeting sequence
  source 1..20: mol_type = other RNA
gttagaggatttatgatagc

SEQ ID NO: 19236 - RNA, 20 nt, synthetic construct
  misc_feature 1..20: note = C9Orf72 CTCN PAM targeting sequence
  source 1..20: mol_type = other RNA
aacagagaagagaagagaaa

SEQ ID NO: 19237 - RNA, 20 nt, synthetic construct
  misc_feature 1..20: note = C9Orf72 CTCN PAM targeting sequence
  source 1..20: mol_type = other RNA
ttaaggtttctatccagtgt

SEQ ID NO: 19238 - RNA, 20 nt, synthetic construct
  misc_feature 1..20: note = C9Orf72 CTCN PAM targeting sequence
  source 1..20: mol_type = other RNA
ctcctgctcagacggtcagc

SEQ ID NO: 19239 - RNA, 20 nt, synthetic construct
  misc_feature 1..20: note = C9Orf72 CTCN PAM targeting sequence
  source 1..20: mol_type = other RNA
tgctcagacggtcagcatga

SEQ ID NO: 19240 - RNA, 20 nt, synthetic construct
  misc_feature 1..20: note = C9Orf72 CTCN PAM targeting sequence
  source 1..20: mol_type = other RNA
gacggtcagcatgagaagtc

SEQ ID NO: 19241 - RNA, 20 nt, synthetic construct
  misc_feature 1..20: note = C9Orf72 CTCN PAM targeting sequence
  source 1..20: mol_type = other RNA
tgctgaccgtctgagcagga

SEQ ID NO: 19242 - RNA, 20 nt, synthetic construct
  misc_feature 1..20: note = C9Orf72 CTCN PAM targeting sequence
  source 1..20: mol_type = other RNA
tactagtgtgtatgctttcc

SEQ ID NO: 19243 - RNA, 20 nt, synthetic construct
  misc_feature 1..20: note = C9Orf72 CTCN PAM targeting sequence
  source 1..20: mol_type = other RNA
aagaccccaacccccaagaa

SEQ ID NO: 19244 - RNA, 20 nt, synthetic construct
  misc_feature 1..20: note = C9Orf72 CTCN PAM targeting sequence
  source 1..20: mol_type = other RNA
ttcttgggggttggggtctt

SEQ ID NO: 19245 - RNA, 20 nt, synthetic construct
  misc_feature 1..20: note = C9Orf72 CTCN PAM targeting sequence
  source 1..20: mol_type = other RNA
atctccttcttgggggttgg

SEQ ID NO: 19246 - RNA, 20 nt, synthetic construct
  misc_feature 1..20: note = C9Orf72 CTCN PAM targeting sequence
  source 1..20: mol_type = other RNA
aactgatgactggcatgttt

SEQ ID NO: 19247 - RNA, 20 nt, synthetic construct
  misc_feature 1..20: note = C9Orf72 CTCN PAM targeting sequence
  source 1..20: mol_type = other RNA
tagcttgttagtttagagcc

SEQ ID NO: 19248 - RNA, 20 nt, synthetic construct
  misc_feature 1..20: note = C9Orf72 CTCN PAM targeting sequence
  source 1..20: mol_type = other RNA
aaactaacaagctatgagcc

SEQ ID NO: 19249 - RNA, 20 nt, synthetic construct
  misc_feature 1..20: note = C9Orf72 CTCN PAM targeting sequence
  source 1..20: mol_type = other RNA
aactacaagtacaaaatctg

SEQ ID NO: 19250 - RNA, 20 nt, synthetic construct
  misc_feature 1..20: note = C9Orf72 CTCN PAM targeting sequence
  source 1..20: mol_type = other RNA
tcaaactacaagtacaaaat

SEQ ID NO: 19251 - RNA, 20 nt, synthetic construct
  misc_feature 1..20: note = C9Orf72 CTCN PAM targeting sequence
  source 1..20: mol_type = other RNA
tggcttttaatccagaaata

SEQ ID NO: 19252 - RNA, 20 nt, synthetic construct
  misc_feature 1..20: note = C9Orf72 CTCN PAM targeting sequence
  source 1..20: mol_type = other RNA
caaacaaagaaatatttctg

SEQ ID NO: 19253 - RNA, 20 nt, synthetic construct
  misc_feature 1..20: note = C9Orf72 CTCN PAM targeting sequence
  source 1..20: mol_type = other RNA
tgtgaaaaggctgttttata

SEQ ID NO: 19254 - RNA, 20 nt, synthetic construct
  misc_feature 1..20: note = C9Orf72 CTCN PAM targeting sequence
  source 1..20: mol_type = other RNA
ggacattgccaaatgaacaa

SEQ ID NO: 19255 - RNA, 20 nt, synthetic construct
  misc_feature 1..20: note = C9Orf72 CTCN PAM targeting sequence
  source 1..20: mol_type = other RNA
tcaatctctcagtcccttct

SEQ ID NO: 19256 - RNA, 20 nt, synthetic construct
  misc_feature 1..20: note = C9Orf72 CTCN PAM targeting sequence
  source 1..20: mol_type = other RNA
atctctcagtcccttctttt

SEQ ID NO: 19257 - RNA, 20 nt, synthetic construct
  misc_feature 1..20: note = C9Orf72 CTCN PAM targeting sequence
  source 1..20: mol_type = other RNA
cagtcccttcttttagaaac

SEQ ID NO: 19258 - RNA, 20 nt, synthetic construct
  misc_feature 1..20: note = C9Orf72 CTCN PAM targeting sequence
  source 1..20: mol_type = other RNA
gtcccttcttttagaaacaa

SEQ ID NO: 19259 - RNA, 20 nt, synthetic construct
  misc_feature 1..20: note = C9Orf72 CTCN PAM targeting sequence
  source 1..20: mol_type = other RNA
gggccctgctcctgttatat

SEQ ID NO: 19260 - RNA, 20 nt, synthetic construct
  misc_feature 1..20: note = C9Orf72 CTCN PAM targeting sequence
  source 1..20: mol_type = other RNA
tgttatatttgatttctctg

SEQ ID NO: 19261 - RNA, 20 nt, synthetic construct
  misc_feature 1..20: note = C9Orf72 CTCN PAM targeting sequence
  source 1..20: mol_type = other RNA
gtcaacctttttacactact

SEQ ID NO: 19262 - RNA, 20 nt, synthetic construct
  misc_feature 1..20: note = C9Orf72 CTCN PAM targeting sequence
  source 1..20: mol_type = other RNA
gggcgtatgtagtagtgtaa

SEQ ID NO: 19263 - RNA, 20 nt, synthetic construct
  misc_feature 1..20: note = C9Orf72 CTCN PAM targeting sequence
  source 1..20: mol_type = other RNA
cttttttctgtcactctggg

SEQ ID NO: 19264 - RNA, 20 nt, synthetic construct
  misc_feature 1..20: note = C9Orf72 CTCN PAM targeting sequence
  source 1..20: mol_type = other RNA
tctcccttttttctgtcact

SEQ ID NO: 19265 - RNA, 20 nt, synthetic construct
  misc_feature 1..20: note = C9Orf72 CTCN PAM targeting sequence
  source 1..20: mol_type = other RNA
tttccttttgctttctttct

SEQ ID NO: 19266 - RNA, 20 nt, synthetic construct
  misc_feature 1..20: note = C9Orf72 CTCN PAM targeting sequence
  source 1..20: mol_type = other RNA
tttgctttcaacttcctttt

SEQ ID NO: 19267 - RNA, 20 nt, synthetic construct
  misc_feature 1..20: note = C9Orf72 CTCN PAM targeting sequence
  source 1..20: mol_type = other RNA
cttccttccttctttcctct

SEQ ID NO: 19268 - RNA, 20 nt, synthetic construct
  misc_feature 1..20: note = C9Orf72 CTCN PAM targeting sequence
  source 1..20: mol_type = other RNA
caccctcccttccttccttc

SEQ ID NO: 19269 - RNA, 20 nt, synthetic construct
  misc_feature 1..20: note = C9Orf72 CTCN PAM targeting sequence
  source 1..20: mol_type = other RNA
cttccttcctcccaccctcc

SEQ ID NO: 19270 - RNA, 20 nt, synthetic construct
  misc_feature 1..20: note = C9Orf72 CTCN PAM targeting sequence
  source 1..20: mol_type = other RNA
cttcctcccttccttcctcc

SEQ ID NO: 19271 - RNA, 20 nt, synthetic construct
  misc_feature 1..20: note = C9Orf72 CTCN PAM targeting sequence
  source 1..20: mol_type = other RNA
ctcccttcctcccttccttc

SEQ ID NO: 19272 - RNA, 20 nt, synthetic construct
  misc_feature 1..20: note = C9Orf72 CTCN PAM targeting sequence
  source 1..20: mol_type = other RNA
ccctcccttcctcccttcct

SEQ ID NO: 19273 - RNA, 20 nt, synthetic construct
  misc_feature 1..20: note = C9Orf72 CTCN PAM targeting sequence
  source 1..20: mol_type = other RNA
cttccttctcctctgctctc

SEQ ID NO: 19274 - RNA, 20 nt, synthetic construct
  misc_feature 1..20: note = C9Orf72 CTCN PAM targeting sequence
  source 1..20: mol_type = other RNA
tctgctctccccactcctac

SEQ ID NO: 19275 - RNA, 20 nt, synthetic construct
  misc_feature 1..20: note = C9Orf72 CTCN PAM targeting sequence
  source 1..20: mol_type = other RNA
gctctccccactcctaccct

SEQ ID NO: 19276 - RNA, 20 nt, synthetic construct
  misc_feature 1..20: note = C9Orf72 CTCN PAM targeting sequence
  source 1..20: mol_type = other RNA
ccccactcctaccctactac

SEQ ID NO: 19277 - RNA, 20 nt, synthetic construct
  misc_feature 1..20: note = C9Orf72 CTCN PAM targeting sequence
  source 1..20: mol_type = other RNA
ccactcctaccctactacgc

SEQ ID NO: 19278 - RNA, 20 nt, synthetic construct
  misc_feature 1..20: note = C9Orf72 CTCN PAM targeting sequence
  source 1..20: mol_type = other RNA
taccctactacgccccaggt

SEQ ID NO: 19279 - RNA, 20 nt, synthetic construct
  misc_feature 1..20: note = C9Orf72 CTCN PAM targeting sequence
  source 1..20: mol_type = other RNA
tatgtcatcatccaagtaga

SEQ ID NO: 19280 - RNA, 20 nt, synthetic construct
  misc_feature 1..20: note = C9Orf72 CTCN PAM targeting sequence
  source 1..20: mol_type = other RNA
tatcctacctgcaatttcct

SEQ ID NO: 19281 - RNA, 20 nt, synthetic construct
  misc_feature 1..20: note = C9Orf72 CTCN PAM targeting sequence
  source 1..20: mol_type = other RNA
ttccttgttttatttttaga

SEQ ID NO: 19282 - RNA, 20 nt, synthetic construct
  misc_feature 1..20: note = C9Orf72 CTCN PAM targeting sequence
  source 1..20: mol_type = other RNA
ttcttttttacaagtagtct

SEQ ID NO: 19283 - RNA, 20 nt, synthetic construct
  misc_feature 1..20: note = C9Orf72 CTCN PAM targeting sequence
  source 1..20: mol_type = other RNA
gctgacccattgactcttga

SEQ ID NO: 19284 - RNA, 20 nt, synthetic construct
  misc_feature 1..20: note = C9Orf72 CTCN PAM targeting sequence
  source 1..20: mol_type = other RNA
tgagaaataataagtagttg

SEQ ID NO: 19285 - RNA, 20 nt, synthetic construct
  misc_feature 1..20: note = C9Orf72 CTCN PAM targeting sequence
  source 1..20: mol_type = other RNA
agagtcaatgggtcagctga

SEQ ID NO: 19286 - RNA, 20 nt, synthetic construct
  misc_feature 1..20: note = C9Orf72 CTCN PAM targeting sequence
  source 1..20: mol_type = other RNA
aaaatgtagcaccttaaaac

SEQ ID NO: 19287 - RNA, 20 nt, synthetic construct
  misc_feature 1..20: note = C9Orf72 CTCN PAM targeting sequence
  source 1..20: mol_type = other RNA
tgtattcatcaagatcacca

SEQ ID NO: 19288 - RNA, 20 nt, synthetic construct
  misc_feature 1..20: note = C9Orf72 CTCN PAM targeting sequence
  source 1..20: mol_type = other RNA
ataaatgttggactggaatg

SEQ ID NO: 19289 - RNA, 20 nt, synthetic construct
  misc_feature 1..20: note = C9Orf72 CTCN PAM targeting sequence
  source 1..20: mol_type = other RNA
atttgccagttcattccagt

SEQ ID NO: 19290 - RNA, 20 nt, synthetic construct
  misc_feature 1..20: note = C9Orf72 CTCN PAM targeting sequence
  source 1..20: mol_type = other RNA
ttgaatttttattcattgtt

SEQ ID NO: 19291 - RNA, 20 nt, synthetic construct
  misc_feature 1..20: note = C9Orf72 CTCN PAM targeting sequence
  source 1..20: mol_type = other RNA
aggtagaatcataacaggtt

SEQ ID NO: 19292 - RNA, 20 nt, synthetic construct
  misc_feature 1..20: note = C9Orf72 CTCN PAM targeting sequence
  source 1..20: mol_type = other RNA
tttgttattataaaaaataa

SEQ ID NO: 19293 - RNA, 20 nt, synthetic construct
  misc_feature 1..20: note = C9Orf72 CTCN PAM targeting sequence
  source 1..20: mol_type = other RNA
tttcctgagtccaggacaca

SEQ ID NO: 19294 - RNA, 20 nt, synthetic construct
  misc_feature 1..20: note = C9Orf72 CTCN PAM targeting sequence
  source 1..20: mol_type = other RNA
ggaaaagagtatcttatcac

SEQ ID NO: 19295 - RNA, 20 nt, synthetic construct
  misc_feature 1..20: note = C9Orf72 CTCN PAM targeting sequence
  source 1..20: mol_type = other RNA
ccccatgtgtcctggactca

SEQ ID NO: 19296 - RNA, 20 nt, synthetic construct
  misc_feature 1..20: note = C9Orf72 CTCN PAM targeting sequence
  source 1..20: mol_type = other RNA
ttctctccccaaagcacaat

SEQ ID NO: 19297 - RNA, 20 nt, synthetic construct
  misc_feature 1..20: note = C9Orf72 CTCN PAM targeting sequence
  source 1..20: mol_type = other RNA
ccccaaagcacaatgaagat

SEQ ID NO: 19298 - RNA, 20 nt, synthetic construct
  misc_feature 1..20: note = C9Orf72 CTCN PAM targeting sequence
  source 1..20: mol_type = other RNA
ccaaagcacaatgaagatct

SEQ ID NO: 19299 - RNA, 20 nt, synthetic construct
  misc_feature 1..20: note = C9Orf72 CTCN PAM targeting sequence
  source 1..20: mol_type = other RNA
gtgtgcccttcaagatcttc

SEQ ID NO: 19300 - RNA, 20 nt, synthetic construct
  misc_feature 1..20: note = C9Orf72 CTCN PAM targeting sequence
  source 1..20: mol_type = other RNA
ctgtgtgcccttcaagatct

SEQ ID NO: 19301 - RNA, 20 nt, synthetic construct
  misc_feature 1..20: note = C9Orf72 CTCN PAM targeting sequence
  source 1..20: mol_type = other RNA
ctctgtgtgcccttcaagat

SEQ ID NO: 19302 - RNA, 20 nt, synthetic construct
  misc_feature 1..20: note = C9Orf72 CTCN PAM targeting sequence
  source 1..20: mol_type = other RNA
gttgccttccctctctctgt

SEQ ID NO: 19303 - RNA, 20 nt, synthetic construct
  misc_feature 1..20: note = C9Orf72 CTCN PAM targeting sequence
  source 1..20: mol_type = other RNA
gtacattcatttggtgtcca

SEQ ID NO: 19304 - RNA, 20 nt, synthetic construct
  misc_feature 1..20: note = C9Orf72 CTCN PAM targeting sequence
  source 1..20: mol_type = other RNA
gtattttaaagctcagcatg

SEQ ID NO: 19305 - RNA, 20 nt, synthetic construct
  misc_feature 1..20: note = C9Orf72 CTCN PAM targeting sequence
  source 1..20: mol_type = other RNA
gcatgggccaaattcaacct

SEQ ID NO: 19306 - RNA, 20 nt, synthetic construct
  misc_feature 1..20: note = C9Orf72 CTCN PAM targeting sequence
  source 1..20: mol_type = other RNA
ggatgaaatatgtgattctt

SEQ ID NO: 19307 - RNA, 20 nt, synthetic construct
  misc_feature 1..20: note = C9Orf72 CTCN PAM targeting sequence
  source 1..20: mol_type = other RNA
cctcctaaatgtggtgtgac

SEQ ID NO: 19308 - RNA, 20 nt, synthetic construct
  misc_feature 1..20: note = C9Orf72 CTCN PAM targeting sequence
  source 1..20: mol_type = other RNA
tcctaaatgtggtgtgactc

SEQ ID NO: 19309 - RNA, 20 nt, synthetic construct
  misc_feature 1..20: note = C9Orf72 CTCN PAM targeting sequence
  source 1..20: mol_type = other RNA
taaatgtggtgtgactctcc

SEQ ID NO: 19310 - RNA, 20 nt, synthetic construct
  misc_feature 1..20: note = C9Orf72 CTCN PAM targeting sequence
  source 1..20: mol_type = other RNA
cccatcaaccacaggtagca

SEQ ID NO: 19311 - RNA, 20 nt, synthetic construct
  misc_feature 1..20: note = C9Orf72 CTCN PAM targeting sequence
  source 1..20: mol_type = other RNA
catcaaccacaggtagcaag

SEQ ID NO: 19312 - RNA, 20 nt, synthetic construct
  misc_feature 1..20: note = C9Orf72 CTCN PAM targeting sequence
  source 1..20: mol_type = other RNA
actgtctgctttctgtatca

SEQ ID NO: 19313 - RNA, 20 nt, synthetic construct
  misc_feature 1..20: note = C9Orf72 CTCN PAM targeting sequence
  source 1..20: mol_type = other RNA
atcatgcccctcctcttgcc

SEQ ID NO: 19314 - RNA, 20 nt, synthetic construct
  misc_feature 1..20: note = C9Orf72 CTCN PAM targeting sequence
  source 1..20: mol_type = other RNA
tcttgccttgtcttggtgaa

SEQ ID NO: 19315 - RNA, 20 nt, synthetic construct
  misc_feature 1..20: note = C9Orf72 CTCN PAM targeting sequence
  source 1..20: mol_type = other RNA
tgccttgtcttggtgaagag

SEQ ID NO: 19316 - RNA, 20 nt, synthetic construct
  misc_feature 1..20: note = C9Orf72 CTCN PAM targeting sequence
  source 1..20: mol_type = other RNA
tcaccaagacaaggcaagag

SEQ ID NO: 19317 - RNA, 20 nt, synthetic construct
  misc_feature 1..20: note = C9Orf72 CTCN PAM targeting sequence
  source 1..20: mol_type = other RNA
ctcttctggccctagcgcct

SEQ ID NO: 19318 - RNA, 20 nt, synthetic construct
  misc_feature 1..20: note = C9Orf72 CTCN PAM targeting sequence
  source 1..20: mol_type = other RNA
cttctggccctagcgccttg

SEQ ID NO: 19319 - RNA, 20 nt, synthetic construct
  misc_feature 1..20: note = C9Orf72 CTCN PAM targeting sequence
  source 1..20: mol_type = other RNA
tctggccctagcgccttgct

SEQ ID NO: 19320 - RNA, 20 nt, synthetic construct
  misc_feature 1..20: note = C9Orf72 CTCN PAM targeting sequence
  source 1..20: mol_type = other RNA
agcccatgtggttccagcaa

SEQ ID NO: 19321 - RNA, 20 nt, synthetic construct
  misc_feature 1..20: note = C9Orf72 CTCN PAM targeting sequence
  source 1..20: mol_type = other RNA
acttcaaggggcccaccctc

SEQ ID NO: 19322 - RNA, 20 nt, synthetic construct
  misc_feature 1..20: note = C9Orf72 CTCN PAM targeting sequence
  source 1..20: mol_type = other RNA
agggcatgttccaagcatca

SEQ ID NO: 19323 - RNA, 20 nt, synthetic construct
  misc_feature 1..20: note = C9Orf72 CTCN PAM targeting sequence
  source 1..20: mol_type = other RNA
ggttggtgatgcttggaaca

SEQ ID NO: 19324 - RNA, 20 nt, synthetic construct
  misc_feature 1..20: note = C9Orf72 CTCN PAM targeting sequence
  source 1..20: mol_type = other RNA
gagaatttatacatggacct

SEQ ID NO: 19325 - RNA, 20 nt, synthetic construct
  misc_feature 1..20: note = C9Orf72 CTCN PAM targeting sequence
  source 1..20: mol_type = other RNA
gagaagaagccctctggttg

SEQ ID NO: 19326 - RNA, 20 nt, synthetic construct
  misc_feature 1..20: note = C9Orf72 CTCN PAM targeting sequence
  source 1..20: mol_type = other RNA
aggtccatgtataaattctc

SEQ ID NO: 19327 - RNA, 20 nt, synthetic construct
  misc_feature 1..20: note = C9Orf72 CTCN PAM targeting sequence
  source 1..20: mol_type = other RNA
ggcttatatcatccttgctt

SEQ ID NO: 19328 - RNA, 20 nt, synthetic construct
  misc_feature 1..20: note = C9Orf72 CTCN PAM targeting sequence
  source 1..20: mol_type = other RNA
gcagccatccccttttcacc

SEQ ID NO: 19329 - RNA, 20 nt, synthetic construct
  misc_feature 1..20: note = C9Orf72 CTCN PAM targeting sequence
  source 1..20: mol_type = other RNA
ctcagttacggatgaactta

SEQ ID NO: 19330 - RNA, 20 nt, synthetic construct
  misc_feature 1..20: note = C9Orf72 CTCN PAM targeting sequence
  source 1..20: mol_type = other RNA
cagttacggatgaacttatc

SEQ ID NO: 19331 - RNA, 20 nt, synthetic construct
  misc_feature 1..20: note = C9Orf72 CTCN PAM targeting sequence
  source 1..20: mol_type = other RNA
gttacggatgaacttatctg

SEQ ID NO: 19332 - RNA, 20 nt, synthetic construct
  misc_feature 1..20: note = C9Orf72 CTCN PAM targeting sequence
  source 1..20: mol_type = other RNA
tgtcgtttctttttcccatt

SEQ ID NO: 19333 - RNA, 20 nt, synthetic construct
  misc_feature 1..20: note = C9Orf72 CTCN PAM targeting sequence
  source 1..20: mol_type = other RNA
gctgtgcttctcttgtcgtt

SEQ ID NO: 19334 - RNA, 20 nt, synthetic construct
  misc_feature 1..20: note = C9Orf72 CTCN PAM targeting sequence
  source 1..20: mol_type = other RNA
cagctgtgcttctcttgtcg

SEQ ID NO: 19335 - RNA, 20 nt, synthetic construct
  misc_feature 1..20: note = C9Orf72 CTCN PAM targeting sequence
  source 1..20: mol_type = other RNA
ttcttttggtgtttctctca

SEQ ID NO: 19336 - RNA, 20 nt, synthetic construct
  misc_feature 1..20: note = C9Orf72 CTCN PAM targeting sequence
  source 1..20: mol_type = other RNA
tgtagctaggaattccaggg

SEQ ID NO: 19337 - RNA, 20 nt, synthetic construct
  misc_feature 1..20: note = C9Orf72 CTCN PAM targeting sequence
  source 1..20: mol_type = other RNA
aactaaagcaaaagggactt

SEQ ID NO: 19338 - RNA, 20 nt, synthetic construct
  misc_feature 1..20: note = C9Orf72 CTCN PAM targeting sequence
  source 1..20: mol_type = other RNA
tgtcacttgccacagaaact

SEQ ID NO: 19339 - RNA, 20 nt, synthetic construct
  misc_feature 1..20: note = C9Orf72 CTCN PAM targeting sequence
  source 1..20: mol_type = other RNA
tagtttctgtggcaagtgac

SEQ ID NO: 19340 - RNA, 20 nt, synthetic construct
  misc_feature 1..20: note = C9Orf72 CTCN PAM targeting sequence
  source 1..20: mol_type = other RNA
ctgcagcacagacactgtgc

SEQ ID NO: 19341 - RNA, 20 nt, synthetic construct
  misc_feature 1..20: note = C9Orf72 CTCN PAM targeting sequence
  source 1..20: mol_type = other RNA
cactgcagcacagacactgt

SEQ ID NO: 19342 - RNA, 20 nt, synthetic construct
  misc_feature 1..20: note = C9Orf72 CTCN PAM targeting sequence
  source 1..20: mol_type = other RNA
ctcactgcagcacagacact

SEQ ID NO: 19343 - RNA, 20 nt, synthetic construct
  misc_feature 1..20: note = C9Orf72 CTCN PAM targeting sequence
  source 1..20: mol_type = other RNA
gggacaaccaataaagcacg

SEQ ID NO: 19344 - RNA, 20 nt, synthetic construct
  misc_feature 1..20: note = C9Orf72 CTCN PAM targeting sequence
  source 1..20: mol_type = other RNA
tgctttattggttgtccctg

SEQ ID NO: 19345 - RNA, 20 nt, synthetic construct
  misc_feature 1..20: note = C9Orf72 CTCN PAM targeting sequence
  source 1..20: mol_type = other RNA
cgtgctttattggttgtccc

SEQ ID NO: 19346 - RNA, 20 nt, synthetic construct
  misc_feature 1..20: note = C9Orf72 CTCN PAM targeting sequence
  source 1..20: mol_type = other RNA
agtatttattcattggctct

SEQ ID NO: 19347 - RNA, 20 nt, synthetic construct
  misc_feature 1..20: note = C9Orf72 CTCN PAM targeting sequence
  source 1..20: mol_type = other RNA
cctcaagtatttattcattg

SEQ ID NO: 19348 - RNA, 20 nt, synthetic construct
  misc_feature 1..20: note = C9Orf72 CTCN PAM targeting sequence
  source 1..20: mol_type = other RNA
tgtaattgctcacctcaagt

SEQ ID NO: 19349 - RNA, 20 nt, synthetic construct
  misc_feature 1..20: note = C9Orf72 CTCN PAM targeting sequence
  source 1..20: mol_type = other RNA
aagaaatgtaaagaatgcct

SEQ ID NO: 19350 - RNA, 20 nt, synthetic construct
  misc_feature 1..20: note = C9Orf72 CTCN PAM targeting sequence
  source 1..20: mol_type = other RNA
ctaagaaatgtaaagaatgc

SEQ ID NO: 19351 - RNA, 20 nt, synthetic construct
  misc_feature 1..20: note = C9Orf72 CTCN PAM targeting sequence
  source 1..20: mol_type = other RNA
gaaaaaatctcagtcattaa

SEQ ID NO: 19352 - RNA, 20 nt, synthetic construct
  misc_feature 1..20: note = C9Orf72 CTCN PAM targeting sequence
  source 1..20: mol_type = other RNA
gtcattaagtgttaaagtac

SEQ ID NO: 19353 - RNA, 20 nt, synthetic construct
  misc_feature 1..20: note = C9Orf72 CTCN PAM targeting sequence
  source 1..20: mol_type = other RNA
aatgtactttaacacttaat

SEQ ID NO: 19354 - RNA, 20 nt, synthetic construct
  misc_feature 1..20: note = C9Orf72 CTCN PAM targeting sequence
  source 1..20: mol_type = other RNA
gcatctagtgcagctccgga

SEQ ID NO: 19355 - RNA, 20 nt, synthetic construct
  misc_feature 1..20: note = C9Orf72 CTCN PAM targeting sequence
  source 1..20: mol_type = other RNA
ggatacacacaacgtggagg

SEQ ID NO: 19356 - RNA, 20 nt, synthetic construct
  misc_feature 1..20: note = C9Orf72 CTCN PAM targeting sequence
  source 1..20: mol_type = other RNA
acgttgtgtgtatccggagc

SEQ ID NO: 19357 - RNA, 20 nt, synthetic construct
  misc_feature 1..20: note = C9Orf72 CTCN PAM targeting sequence
  source 1..20: mol_type = other RNA
ccaaatgttagttccctgcc

SEQ ID NO: 19358 - RNA, 20 nt, synthetic construct
  misc_feature 1..20: note = C9Orf72 CTCN PAM targeting sequence
  source 1..20: mol_type = other RNA
cgaagatcttggatggtggg

SEQ ID NO: 19359 - RNA, 20 nt, synthetic construct
  misc_feature 1..20: note = C9Orf72 CTCN PAM targeting sequence
  source 1..20: mol_type = other RNA
aaaatgaaggtaataatacc

SEQ ID NO: 19360 - RNA, 20 nt, synthetic construct
  misc_feature 1..20: note = C9Orf72 CTCN PAM targeting sequence
  source 1..20: mol_type = other RNA
gtatgaaccttaggcaagtt

SEQ ID NO: 19361 - RNA, 20 nt, synthetic construct
  misc_feature 1..20: note = C9Orf72 CTCN PAM targeting sequence
  source 1..20: mol_type = other RNA
caatcatgactgttcccttg

SEQ ID NO: 19362 - RNA, 20 nt, synthetic construct
  misc_feature 1..20: note = C9Orf72 CTCN PAM targeting sequence
  source 1..20: mol_type = other RNA
atcatgactgttcccttgca

SEQ ID NO: 19363 - RNA, 20 nt, synthetic construct
  misc_feature 1..20: note = C9Orf72 CTCN PAM targeting sequence
  source 1..20: mol_type = other RNA
gtaagaactgagattagcgt

SEQ ID NO: 19364 - RNA, 20 nt, synthetic construct
  misc_feature 1..20: note = C9Orf72 CTCN PAM targeting sequence
  source 1..20: mol_type = other RNA
gttcttacagaggggatgga

SEQ ID NO: 19365 - RNA, 20 nt, synthetic construct
  misc_feature 1..20: note = C9Orf72 CTCN PAM targeting sequence
  source 1..20: mol_type = other RNA
ctaaacgctaatctcagttc

SEQ ID NO: 19366 - RNA, 20 nt, synthetic construct
  misc_feature 1..20: note = C9Orf72 CTCN PAM targeting sequence
  source 1..20: mol_type = other RNA
gatgccctgtgtcacatctc

SEQ ID NO: 19367 - RNA, 20 nt, synthetic construct
  misc_feature 1..20: note = C9Orf72 CTCN PAM targeting sequence
  source 1..20: mol_type = other RNA
tgacacatctctgatttcag

SEQ ID NO: 19368 - RNA, 20 nt, synthetic construct
  misc_feature 1..20: note = C9Orf72 CTCN PAM targeting sequence
  source 1..20: mol_type = other RNA
gatttcagtgcacttatgat

SEQ ID NO: 19369 - RNA, 20 nt, synthetic construct
  misc_feature 1..20: note = C9Orf72 CTCN PAM targeting sequence
  source 1..20: mol_type = other RNA
ttcccagatctcaagcacgc

SEQ ID NO: 19370 - RNA, 20 nt, synthetic construct
  misc_feature 1..20: note = C9Orf72 CTCN PAM targeting sequence
  source 1..20: mol_type = other RNA
agcacgcagcagtcattatt

SEQ ID NO: 19371 - RNA, 20 nt, synthetic construct
  misc_feature 1..20: note = C9Orf72 CTCN PAM targeting sequence
  source 1..20: mol_type = other RNA
tgcatctgtggaaaccgtcc

SEQ ID NO: 19372 - RNA, 20 nt, synthetic construct
  misc_feature 1..20: note = C9Orf72 CTCN PAM targeting sequence
  source 1..20: mol_type = other RNA
gcctaggagaaagcacagtg

SEQ ID NO: 19373 - RNA, 20 nt, synthetic construct
  misc_feature 1..20: note = C9Orf72 CTCN PAM targeting sequence
  source 1..20: mol_type = other RNA
taggctgagcaagctcctgc

SEQ ID NO: 19374 - RNA, 20 nt, synthetic construct
  misc_feature 1..20: note = C9Orf72 CTCN PAM targeting sequence
  source 1..20: mol_type = other RNA
ctgcagcacagacactgtgc

SEQ ID NO: 19375 - RNA, 20 nt, synthetic construct
  misc_feature 1..20: note = C9Orf72 CTCN PAM targeting sequence
  source 1..20: mol_type = other RNA
ctcgctgcagcacagacact

SEQ ID NO: 19376 - RNA, 20 nt, synthetic construct
  misc_feature 1..20: note = C9Orf72 CTCN PAM targeting sequence
  source 1..20: mol_type = other RNA
tggacaaccaatggagcatg

SEQ ID NO: 19377 - RNA, 20 nt, synthetic construct
  misc_feature 1..20: note = C9Orf72 CTCN PAM targeting sequence
  source 1..20: mol_type = other RNA
attggttgtccatgagaact

SEQ ID NO: 19378 - RNA, 20 nt, synthetic construct
  misc_feature 1..20: note = C9Orf72 CTCN PAM targeting sequence
  source 1..20: mol_type = other RNA
tgctccattggttgtccatg

SEQ ID NO: 19379 - RNA, 20 nt, synthetic construct
  misc_feature 1..20: note = C9Orf72 CTCN PAM targeting sequence
  source 1..20: mol_type = other RNA
catgctccattggttgtcca

SEQ ID NO: 19380 - RNA, 20 nt, synthetic construct
  misc_feature 1..20: note = C9Orf72 CTCN PAM targeting sequence
  source 1..20: mol_type = other RNA
agtatttattcattggctct

SEQ ID NO: 19381 - RNA, 20 nt, synthetic construct
  misc_feature 1..20: note = C9Orf72 CTCN PAM targeting sequence
  source 1..20: mol_type = other RNA
cctcaagtatttattcattg

SEQ ID NO: 19382 - RNA, 20 nt, synthetic construct
  misc_feature 1..20: note = C9Orf72 CTCN PAM targeting sequence
  source 1..20: mol_type = other RNA
cgtaattgctcacctcaagt

SEQ ID NO: 19383 - RNA, 20 nt, synthetic construct
  misc_feature 1..20: note = C9Orf72 CTCN PAM targeting sequence
  source 1..20: mol_type = other RNA
aagaaatgtaaagaatgcct

SEQ ID NO: 19384 - RNA, 20 nt, synthetic construct
  misc_feature 1..20: note = C9Orf72 CTCN PAM targeting sequence
  source 1..20: mol_type = other RNA
ctaagaaatgtaaagaatgc

SEQ ID NO: 19385 - RNA, 20 nt, synthetic construct
  misc_feature 1..20: note = C9Orf72 CTCN PAM targeting sequence
  source 1..20: mol_type = other RNA
ttcgtgttgcaggctgactg

SEQ ID NO: 19386 - RNA, 20 nt, synthetic construct
  misc_feature 1..20: note = C9Orf72 CTCN PAM targeting sequence
  source 1..20: mol_type = other RNA
cattcccacttcctggaatc

SEQ ID NO: 19387 - RNA, 20 nt, synthetic construct
  misc_feature 1..20: note = C9Orf72 CTCN PAM targeting sequence
  source 1..20: mol_type = other RNA
ttcccacttcctggaatcac

SEQ ID NO: 19388 - RNA, 20 nt, synthetic construct
  misc_feature 1..20: note = C9Orf72 CTCN PAM targeting sequence
  source 1..20: mol_type = other RNA
caaacaaactaactgcatac

SEQ ID NO: 19389 - RNA, 20 nt, synthetic construct
  misc_feature 1..20: note = C9Orf72 CTCN PAM targeting sequence
  source 1..20: mol_type = other RNA
ggctctgatagtgtgggatt

SEQ ID NO: 19390 - RNA, 20 nt, synthetic construct
  misc_feature 1..20: note = C9Orf72 CTCN PAM targeting sequence
  source 1..20: mol_type = other RNA
gatagtgtgggattccaaac

SEQ ID NO: 19391 - RNA, 20 nt, synthetic construct
  misc_feature 1..20: note = C9Orf72 CTCN PAM targeting sequence
  source 1..20: mol_type = other RNA
gcttaaaccagcaagagcaa

SEQ ID NO: 19392 - RNA, 20 nt, synthetic construct
  misc_feature 1..20: note = C9Orf72 CTCN PAM targeting sequence
  source 1..20: mol_type = other RNA
tgctggtttaagctgagctt

SEQ ID NO: 19393 - RNA, 20 nt, synthetic construct
  misc_feature 1..20: note = C9Orf72 CTCN PAM targeting sequence
  source 1..20: mol_type = other RNA
tacatagaaccccctttgag

SEQ ID NO: 19394 - RNA, 20 nt, synthetic construct
  misc_feature 1..20: note = C9Orf72 CTCN PAM targeting sequence
  source 1..20: mol_type = other RNA
aagggggttctatgtaagag

SEQ ID NO: 19395 - RNA, 20 nt, synthetic construct
  misc_feature 1..20: note = C9Orf72 CTCN PAM targeting sequence
  source 1..20: mol_type = other RNA
aagtctataacttaaacatg

SEQ ID NO: 19396 - RNA, 20 nt, synthetic construct
  misc_feature 1..20: note = C9Orf72 CTCN PAM targeting sequence
  source 1..20: mol_type = other RNA
tctgagtaaattttcaatgg

SEQ ID NO: 19397 - RNA, 20 nt, synthetic construct
  misc_feature 1..20: note = C9Orf72 CTCN PAM targeting sequence
  source 1..20: mol_type = other RNA
gaagagaagaataattaata

SEQ ID NO: 19398 - RNA, 20 nt, synthetic construct
  misc_feature 1..20: note = C9Orf72 CTCN PAM targeting sequence
  source 1..20: mol_type = other RNA
cttctcttatctatcagtct

SEQ ID NO: 19399 - RNA, 20 nt, synthetic construct
  misc_feature 1..20: note = C9Orf72 CTCN PAM targeting sequence
  source 1..20: mol_type = other RNA
tatctatcagtcttgatctg

SEQ ID NO: 19400 - RNA, 20 nt, synthetic construct
  misc_feature 1..20: note = C9Orf72 CTCN PAM targeting sequence
  source 1..20: mol_type = other RNA
aattaggtagaagatactta

SEQ ID NO: 19401 - RNA, 20 nt, synthetic construct
  misc_feature 1..20: note = C9Orf72 CTCN PAM targeting sequence
  source 1..20: mol_type = other RNA
acttggaaggcagcacagca

SEQ ID NO: 19402 - RNA, 20 nt, synthetic construct
  misc_feature 1..20: note = C9Orf72 CTCN PAM targeting sequence
  source 1..20: mol_type = other RNA
gaactaacatgctgtgctgc

SEQ ID NO: 19403 - RNA, 20 nt, synthetic construct
  misc_feature 1..20: note = C9Orf72 CTCN PAM targeting sequence
  source 1..20: mol_type = other RNA
gtatcccttagcctagtcca

SEQ ID NO: 19404 - RNA, 20 nt, synthetic construct
  misc_feature 1..20: note = C9Orf72 CTCN PAM targeting sequence
  source 1..20: mol_type = other RNA
gtctgctaatttcttccaga

SEQ ID NO: 19405 - RNA, 20 nt, synthetic construct
  misc_feature 1..20: note = C9Orf72 CTCN PAM targeting sequence
  source 1..20: mol_type = other RNA
cacattggtaagggtggatc

SEQ ID NO: 19406 - RNA, 20 nt, synthetic construct
  misc_feature 1..20: note = C9Orf72 CTCN PAM targeting sequence
  source 1..20: mol_type = other RNA
atggattggatgatgccctc

SEQ ID NO: 19407 - RNA, 20 nt, synthetic construct
  misc_feature 1..20: note = C9Orf72 CTCN PAM targeting sequence
  source 1..20: mol_type = other RNA
gggccctcaatggattggat

SEQ ID NO: 19408 - RNA, 20 nt, synthetic construct
  misc_feature 1..20: note = C9Orf72 CTCN PAM targeting sequence
  source 1..20: mol_type = other RNA
ctgggccctcaatggattgg

SEQ ID NO: 19409 - RNA, 20 nt, synthetic construct
  misc_feature 1..20: note = C9Orf72 CTCN PAM targeting sequence
  source 1..20: mol_type = other RNA
ctcttctggtgctgaaacat

SEQ ID NO: 19410 - RNA, 20 nt, synthetic construct
  misc_feature 1..20: note = C9Orf72 CTCN PAM targeting sequence
  source 1..20: mol_type = other RNA
cttctggtgctgaaacatcc

SEQ ID NO: 19411 - RNA, 20 nt, synthetic construct
  misc_feature 1..20: note = C9Orf72 CTCN PAM targeting sequence
  source 1..20: mol_type = other RNA
tctggtgctgaaacatccac

SEQ ID NO: 19412 - RNA, 20 nt, synthetic construct
  misc_feature 1..20: note = C9Orf72 CTCN PAM targeting sequence
  source 1..20: mol_type = other RNA
caattcccccatcccatttc

SEQ ID NO: 19413 - RNA, 20 nt, synthetic construct
  misc_feature 1..20: note = C9Orf72 CTCN PAM targeting sequence
  source 1..20: mol_type = other RNA
ggccttcaggcttgggctga

SEQ ID NO: 19414 - RNA, 20 nt, synthetic construct
  misc_feature 1..20: note = C9Orf72 CTCN PAM targeting sequence
  source 1..20: mol_type = other RNA
tctagttctccagctcaaaa

SEQ ID NO: 19415 - RNA, 20 nt, synthetic construct
  misc_feature 1..20: note = C9Orf72 CTCN PAM targeting sequence
  source 1..20: mol_type = other RNA
agttctccagctcaaaaaca

SEQ ID NO: 19416 - RNA, 20 nt, synthetic construct
  misc_feature 1..20: note = C9Orf72 CTCN PAM targeting sequence
  source 1..20: mol_type = other RNA
agctcaaaaacagcagactg

SEQ ID NO: 19417 - RNA, 20 nt, synthetic construct
  misc_feature 1..20: note = C9Orf72 CTCN PAM targeting sequence
  source 1..20: mol_type = other RNA
aaaacagcagactgggggac

SEQ ID NO: 19418 - RNA, 20 nt, synthetic construct
  misc_feature 1..20: note = C9Orf72 CTCN PAM targeting sequence
  source 1..20: mol_type = other RNA
gcttccataatcatgtaagc

SEQ ID NO: 19419 - RNA, 20 nt, synthetic construct
  misc_feature 1..20: note = C9Orf72 CTCN PAM targeting sequence
  source 1..20: mol_type = other RNA
cccactctgtttctcttgag

SEQ ID NO: 19420 - RNA, 20 nt, synthetic construct
  misc_feature 1..20: note = C9Orf72 CTCN PAM targeting sequence
  source 1..20: mol_type = other RNA
gtttctcttgagaaccatga

SEQ ID NO: 19421 - RNA, 20 nt, synthetic construct
  misc_feature 1..20: note = C9Orf72 CTCN PAM targeting sequence
  source 1..20: mol_type = other RNA
tgagaaccatgattaatgat

SEQ ID NO: 19422 - RNA, 20 nt, synthetic construct
  misc_feature 1..20: note = C9Orf72 CTCN PAM targeting sequence
  source 1..20: mol_type = other RNA
agagaaacagagtgggggag

SEQ ID NO: 19423 - RNA, 20 nt, synthetic construct
  misc_feature 1..20: note = C9Orf72 CTCN PAM targeting sequence
  source 1..20: mol_type = other RNA
aaaacttagtggcttaaaac

SEQ ID NO: 19424 - RNA, 20 nt, synthetic construct
  misc_feature 1..20: note = C9Orf72 CTCN PAM targeting sequence
  source 1..20: mol_type = other RNA
gcccatagctcccactatag

SEQ ID NO: 19425 - RNA, 20 nt, synthetic construct
  misc_feature 1..20: note = C9Orf72 CTCN PAM targeting sequence
  source 1..20: mol_type = other RNA
cactataggacctagcctgc

SEQ ID NO: 19426 - RNA, 20 nt, synthetic construct
  misc_feature 1..20: note = C9Orf72 CTCN PAM targeting sequence
  source 1..20: mol_type = other RNA
gcaggctaggtcctatagtg

SEQ ID NO: 19427 - RNA, 20 nt, synthetic construct
  misc_feature 1..20: note = C9Orf72 CTCN PAM targeting sequence
  source 1..20: mol_type = other RNA
gccacagtggccactaacat

SEQ ID NO: 19428 - RNA, 20 nt, synthetic construct
  misc_feature 1..20: note = C9Orf72 CTCN PAM targeting sequence
  source 1..20: mol_type = other RNA
ttttcactctgccacagtgg

SEQ ID NO: 19429 - RNA, 20 nt, synthetic construct
  misc_feature 1..20: note = C9Orf72 CTCN PAM targeting sequence
  source 1..20: mol_type = other RNA
tgcaaagccttccatctgaa

SEQ ID NO: 19430 - RNA, 20 nt, synthetic construct
  misc_feature 1..20: note = C9Orf72 CTCN PAM targeting sequence
  source 1..20: mol_type = other RNA
ttggccaatgaaacatgaac

SEQ ID NO: 19431 - RNA, 20 nt, synthetic construct
  misc_feature 1..20: note = C9Orf72 CTCN PAM targeting sequence
  source 1..20: mol_type = other RNA
ctttggccaatgaaacatga

SEQ ID NO: 19432 - RNA, 20 nt, synthetic construct
  misc_feature 1..20: note = C9Orf72 CTCN PAM targeting sequence
  source 1..20: mol_type = other RNA
tttcttatctgcaaggcaga

SEQ ID NO: 19433 - RNA, 20 nt, synthetic construct
  misc_feature 1..20: note = C9Orf72 CTCN PAM targeting sequence
  source 1..20: mol_type = other RNA
ccctttttttctcctttctt

SEQ ID NO: 19434 - RNA, 20 nt, synthetic construct
  misc_feature 1..20: note = C9Orf72 CTCN PAM targeting sequence
  source 1..20: mol_type = other RNA
tcatgtactgaggggatatc

SEQ ID NO: 19435 - RNA, 20 nt, synthetic construct
  misc_feature 1..20: note = C9Orf72 CTCN PAM targeting sequence
  source 1..20: mol_type = other RNA
gtacatgatgagaacactga

SEQ ID NO: 19436 - RNA, 20 nt, synthetic construct
  misc_feature 1..20: note = C9Orf72 CTCN PAM targeting sequence
  source 1..20: mol_type = other RNA
taataaccttgtaaagtgga

SEQ ID NO: 19437 - RNA, 20 nt, synthetic construct
  misc_feature 1..20: note = C9Orf72 CTCN PAM targeting sequence
  source 1..20: mol_type = other RNA
ataaatgctgctattttgac

SEQ ID NO: 19438 - RNA, 20 nt, synthetic construct
  misc_feature 1..20: note = C9Orf72 CTCN PAM targeting sequence
  source 1..20: mol_type = other RNA
aatctttcctacatctctgg

SEQ ID NO: 19439 - RNA, 20 nt, synthetic construct
  misc_feature 1..20: note = C9Orf72 CTCN PAM targeting sequence
  source 1..20: mol_type = other RNA
gggagtaaaaaactcttgaa

SEQ ID NO: 19440 - RNA, 20 nt, synthetic construct
  misc_feature 1..20: note = C9Orf72 CTCN PAM targeting sequence
  source 1..20: mol_type = other RNA
cagagatgtaggaaagattg

SEQ ID NO: 19441 - RNA, 20 nt, synthetic construct
  misc_feature 1..20: note = C9Orf72 CTCN PAM targeting sequence
  source 1..20: mol_type = other RNA
tgaatctttttctggaggtt

SEQ ID NO: 19442 - RNA, 20 nt, synthetic construct
  misc_feature 1..20: note = C9Orf72 CTCN PAM targeting sequence
  source 1..20: mol_type = other RNA
agaaaaagattcaagagttt

SEQ ID NO: 19443 - RNA, 20 nt, synthetic construct
  misc_feature 1..20: note = C9Orf72 CTCN PAM targeting sequence
  source 1..20: mol_type = other RNA
tttttaaagactagaaaatg

SEQ ID NO: 19444 - RNA, 20 nt, synthetic construct
  misc_feature 1..20: note = C9Orf72 CTCN PAM targeting sequence
  source 1..20: mol_type = other RNA
aaattctgaccattctaaga

SEQ ID NO: 19445 - RNA, 20 nt, synthetic construct
  misc_feature 1..20: note = C9Orf72 CTCN PAM targeting sequence
  source 1..20: mol_type = other RNA
gtgctcctcacacagaaagg

SEQ ID NO: 19446 - RNA, 20 nt, synthetic construct
  misc_feature 1..20: note = C9Orf72 CTCN PAM targeting sequence
  source 1..20: mol_type = other RNA
tcacacagaaaggttctagt

SEQ ID NO: 19447 - RNA, 20 nt, synthetic construct
  misc_feature 1..20: note = C9Orf72 CTCN PAM targeting sequence
  source 1..20: mol_type = other RNA
cacagaaaggttctagtaag

SEQ ID NO: 19448 - RNA, 20 nt, synthetic construct
  misc_feature 1..20: note = C9Orf72 CTCN PAM targeting sequence
  source 1..20: mol_type = other RNA
ttccttactagaacctttct

SEQ ID NO: 19449 - RNA, 20 nt, synthetic construct
  misc_feature 1..20: note = C9Orf72 CTCN PAM targeting sequence
  source 1..20: mol_type = other RNA
tctttaaagcagaaagtatt

SEQ ID NO: 19450 - RNA, 20 nt, synthetic construct
  misc_feature 1..20: note = C9Orf72 CTCN PAM targeting sequence
  source 1..20: mol_type = other RNA
tttaatatttgcgtagctct

SEQ ID NO: 19451 - RNA, 20 nt, synthetic construct
  misc_feature 1..20: note = C9Orf72 CTCN PAM targeting sequence
  source 1..20: mol_type = other RNA
gaaaaactcagcataagttc

SEQ ID NO: 19452 - RNA, 20 nt, synthetic construct
  misc_feature 1..20: note = C9Orf72 CTCN PAM targeting sequence
  source 1..20: mol_type = other RNA
gcataagttcattagaacag

SEQ ID NO: 19453 - RNA, 20 nt, synthetic construct
  misc_feature 1..20: note = C9Orf72 CTCN PAM targeting sequence
  source 1..20: mol_type = other RNA
ggcttcatgacagtgagtag

SEQ ID NO: 19454 - RNA, 20 nt, synthetic construct
  misc_feature 1..20: note = C9Orf72 CTCN PAM targeting sequence
  source 1..20: mol_type = other RNA
ctgtcatgaagccagaggaa

SEQ ID NO: 19455 - RNA, 20 nt, synthetic construct
  misc_feature 1..20: note = C9Orf72 CTCN PAM targeting sequence
  source 1..20: mol_type = other RNA
cgctttccctagggaaggca

SEQ ID NO: 19456 - RNA, 20 nt, synthetic construct
  misc_feature 1..20: note = C9Orf72 CTCN PAM targeting sequence
  source 1..20: mol_type = other RNA
ctttccctagggaaggcagg

SEQ ID NO: 19457 - RNA, 20 nt, synthetic construct
  misc_feature 1..20: note = C9Orf72 CTCN PAM targeting sequence
  source 1..20: mol_type = other RNA
gaccctaccaggcccctgcc

SEQ ID NO: 19458 - RNA, 20 nt, synthetic construct
  misc_feature 1..20: note = C9Orf72 CTCN PAM targeting sequence
  source 1..20: mol_type = other RNA
tgctcagaccctaccaggcc

SEQ ID NO: 19459 - RNA, 20 nt, synthetic construct
  misc_feature 1..20: note = C9Orf72 CTCN PAM targeting sequence
  source 1..20: mol_type = other RNA
ggctcttgctcagaccctac

SEQ ID NO: 19460 - RNA, 20 nt, synthetic construct
  misc_feature 1..20: note = C9Orf72 CTCN PAM targeting sequence
  source 1..20: mol_type = other RNA
ccttctccctccactcatgc

SEQ ID NO: 19461 - RNA, 20 nt, synthetic construct
  misc_feature 1..20: note = C9Orf72 CTCN PAM targeting sequence
  source 1..20: mol_type = other RNA
ctccactcatgccagttttt

SEQ ID NO: 19462 - RNA, 20 nt, synthetic construct
  misc_feature 1..20: note = C9Orf72 CTCN PAM targeting sequence
  source 1..20: mol_type = other RNA
actcatgccagtttttggtt

SEQ ID NO: 19463 - RNA, 20 nt, synthetic construct
  misc_feature 1..20: note = C9Orf72 CTCN PAM targeting sequence
  source 1..20: mol_type = other RNA
tgccagtttttggtttagaa

SEQ ID NO: 19464 - RNA, 20 nt, synthetic construct
  misc_feature 1..20: note = C9Orf72 CTCN PAM targeting sequence
  source 1..20: mol_type = other RNA
agactttctcattgtcctca

SEQ ID NO: 19465 - RNA, 20 nt, synthetic construct
  misc_feature 1..20: note = C9Orf72 CTCN PAM targeting sequence
  source 1..20: mol_type = other RNA
ttgtcctcagggtgggttgc

SEQ ID NO: 19466 - RNA, 20 nt, synthetic construct
  misc_feature 1..20: note = C9Orf72 CTCN PAM targeting sequence
  source 1..20: mol_type = other RNA
gggtgggttgctgcccccca

SEQ ID NO: 19467 - RNA, 20 nt, synthetic construct
  misc_feature 1..20: note = C9Orf72 CTCN PAM targeting sequence
  source 1..20: mol_type = other RNA
ttgttcccatatgaaggtca

SEQ ID NO: 19468 - RNA, 20 nt, synthetic construct
  misc_feature 1..20: note = C9Orf72 CTCN PAM targeting sequence
  source 1..20: mol_type = other RNA
gggtctacatgcactgaatc

SEQ ID NO: 19469 - RNA, 20 nt, synthetic construct
  misc_feature 1..20: note = C9Orf72 CTCN PAM targeting sequence
  source 1..20: mol_type = other RNA
agttatttttaaaatgtgct

SEQ ID NO: 19470 - RNA, 20 nt, synthetic construct
  misc_feature 1..20: note = C9Orf72 CTCN PAM targeting sequence
  source 1..20: mol_type = other RNA
ttagagaagctctggtctct

SEQ ID NO: 19471 - RNA, 20 nt, synthetic construct
  misc_feature 1..20: note = C9Orf72 CTCN PAM targeting sequence
  source 1..20: mol_type = other RNA
aaggagctaagggaaagcac

SEQ ID NO: 19472 - RNA, 20 nt, synthetic construct
  misc_feature 1..20: note = C9Orf72 CTCN PAM targeting sequence
  source 1..20: mol_type = other RNA
ggtctcttgcctgtgtgggt

SEQ ID NO: 19473 - RNA, 20 nt, synthetic construct
  misc_feature 1..20: note = C9Orf72 CTCN PAM targeting sequence
  source 1..20: mol_type = other RNA
tgcctgtgtgggtctaggcc

SEQ ID NO: 19474 - RNA, 20 nt, synthetic construct
  misc_feature 1..20: note = C9Orf72 CTCN PAM targeting sequence
  source 1..20: mol_type = other RNA
acattttttttttttctggc

SEQ ID NO: 19475 - RNA, 20 nt, synthetic construct
  misc_feature 1..20: note = C9Orf72 CTCN PAM targeting sequence
  source 1..20: mol_type = other RNA
ggcttccattaatagcctca

SEQ ID NO: 19476 - RNA, 20 nt, synthetic construct
  misc_feature 1..20: note = C9Orf72 CTCN PAM targeting sequence
  source 1..20: mol_type = other RNA
gttttgaccccaaattttaa

SEQ ID NO: 19477 - RNA, 20 nt, synthetic construct
  misc_feature 1..20: note = C9Orf72 CTCN PAM targeting sequence
  source 1..20: mol_type = other RNA
agcagcttaaatgactcatg

SEQ ID NO: 19478 - RNA, 20 nt, synthetic construct
  misc_feature 1..20: note = C9Orf72 CTCN PAM targeting sequence
  source 1..20: mol_type = other RNA
tgtgcctagaaccaggaaga

SEQ ID NO: 19479 - RNA, 20 nt, synthetic construct
  misc_feature 1..20: note = C9Orf72 CTCN PAM targeting sequence
  source 1..20: mol_type = other RNA
tatgcatggtcttcctggtt

SEQ ID NO: 19480 - RNA, 20 nt, synthetic construct
  misc_feature 1..20: note = C9Orf72 CTCN PAM targeting sequence
  source 1..20: mol_type = other RNA
tacaggtatgtgtggaaggg

SEQ ID NO: 19481 - RNA, 20 nt, synthetic construct
  misc_feature 1..20: note = C9Orf72 CTCN PAM targeting sequence
  source 1..20: mol_type = other RNA
ctgctgctggactgtggcac

SEQ ID NO: 19482 - RNA, 20 nt, synthetic construct
  misc_feature 1..20: note = C9Orf72 CTCN PAM targeting sequence
  source 1..20: mol_type = other RNA
gcaatctgactgcttccagc

SEQ ID NO: 19483 - RNA, 20 nt, synthetic construct
  misc_feature 1..20: note = C9Orf72 CTCN PAM targeting sequence
  source 1..20: mol_type = other RNA
ctaactcatcggggtcaagt

SEQ ID NO: 19484 - RNA, 20 nt, synthetic construct
  misc_feature 1..20: note = C9Orf72 CTCN PAM targeting sequence
  source 1..20: mol_type = other RNA
aactcatcggggtcaagtgg

SEQ ID NO: 19485 - RNA, 20 nt, synthetic construct
  misc_feature 1..20: note = C9Orf72 CTCN PAM targeting sequence
  source 1..20: mol_type = other RNA
tcggggtcaagtggcctgaa

SEQ ID NO: 19486 - RNA, 20 nt, synthetic construct
  misc_feature 1..20: note = C9Orf72 CTCN PAM targeting sequence
  source 1..20: mol_type = other RNA
gattcccccaaaagataaga

SEQ ID NO: 19487 - RNA, 20 nt, synthetic construct
  misc_feature 1..20: note = C9Orf72 CTCN PAM targeting sequence
  source 1..20: mol_type = other RNA
aaggggtctctgattccccc

SEQ ID NO: 19488 - RNA, 20 nt, synthetic construct
  misc_feature 1..20: note = C9Orf72 CTCN PAM targeting sequence
  source 1..20: mol_type = other RNA
gattctcaaaggggtctctg

SEQ ID NO: 19489 - RNA, 20 nt, synthetic construct
  misc_feature 1..20: note = C9Orf72 CTCN PAM targeting sequence
  source 1..20: mol_type = other RNA
atagccttcctcagattctc

SEQ ID NO: 19490 - RNA, 20 nt, synthetic construct
  misc_feature 1..20: note = C9Orf72 CTCN PAM targeting sequence
  source 1..20: mol_type = other RNA
gattaatggtatgtagatac

SEQ ID NO: 19491 - RNA, 20 nt, synthetic construct
  misc_feature 1..20: note = C9Orf72 CTCN PAM targeting sequence
  source 1..20: mol_type = other RNA
gaatgaatgaatagtatcta

SEQ ID NO: 19492 - RNA, 20 nt, synthetic construct
  misc_feature 1..20: note = C9Orf72 CTCN PAM targeting sequence
  source 1..20: mol_type = other RNA
acaaggctgtgtccttgtct

SEQ ID NO: 19493 - RNA, 20 nt, synthetic construct
  misc_feature 1..20: note = C9Orf72 CTCN PAM targeting sequence
  source 1..20: mol_type = other RNA
cagtctaatgggagacaaaa

SEQ ID NO: 19494 - RNA, 20 nt, synthetic construct
  misc_feature 1..20: note = C9Orf72 CTCN PAM targeting sequence
  source 1..20: mol_type = other RNA
cattagactgtgagctccac

SEQ ID NO: 19495 - RNA, 20 nt, synthetic construct
  misc_feature 1..20: note = C9Orf72 CTCN PAM targeting sequence
  source 1..20: mol_type = other RNA
ttatcatgcatcattattat

SEQ ID NO: 19496 - RNA, 20 nt, synthetic construct
  misc_feature 1..20: note = C9Orf72 CTCN PAM targeting sequence
  source 1..20: mol_type = other RNA
tgtttgcttctacacttaca

SEQ ID NO: 19497 - RNA, 20 nt, synthetic construct
  misc_feature 1..20: note = C9Orf72 CTCN PAM targeting sequence
  source 1..20: mol_type = other RNA
atgggatagggatcttgtct

SEQ ID NO: 19498 - RNA, 20 nt, synthetic construct
  misc_feature 1..20: note = C9Orf72 CTCN PAM targeting sequence
  source 1..20: mol_type = other RNA
caactaaaagttagaggagg

SEQ ID NO: 19499 - RNA, 20 nt, synthetic construct
  misc_feature 1..20: note = C9Orf72 CTCN PAM targeting sequence
  source 1..20: mol_type = other RNA
actaaaagttagaggagggg

SEQ ID NO: 19500 - RNA, 20 nt, synthetic construct
  misc_feature 1..20: note = C9Orf72 CTCN PAM targeting sequence
  source 1..20: mol_type = other RNA
aacttttagttgagagtatt

SEQ ID NO: 19501 - RNA, 20 nt, synthetic construct
  misc_feature 1..20: note = C9Orf72 CTCN PAM targeting sequence
  source 1..20: mol_type = other RNA
tctaacttttagttgagagt

SEQ ID NO: 19502 - RNA, 20 nt, synthetic construct
  misc_feature 1..20: note = C9Orf72 CTCN PAM targeting sequence
  source 1..20: mol_type = other RNA
cactacctgcaatacgctta

SEQ ID NO: 19503 - RNA, 20 nt, synthetic construct
  misc_feature 1..20: note = C9Orf72 CTCN PAM targeting sequence
  source 1..20: mol_type = other RNA
ccttgctgttactgggcctg

SEQ ID NO: 19504 - RNA, 20 nt, synthetic construct
  misc_feature 1..20: note = C9Orf72 CTCN PAM targeting sequence
  source 1..20: mol_type = other RNA
ccatgaaggcaggagcagtg

SEQ ID NO: 19505 - RNA, 20 nt, synthetic construct
  misc_feature 1..20: note = C9Orf72 CTCN PAM targeting sequence
  source 1..20: mol_type = other RNA
atgaaggcaggagcagtgag

SEQ ID NO: 19506 - RNA, 20 nt, synthetic construct
  misc_feature 1..20: note = C9Orf72 CTCN PAM targeting sequence
  source 1..20: mol_type = other RNA
tgccttcatggagagccctg

SEQ ID NO: 19507 - RNA, 20 nt, synthetic construct
  misc_feature 1..20: note = C9Orf72 CTCN PAM targeting sequence
  source 1..20: mol_type = other RNA
ctgctcctgccttcatggag

SEQ ID NO: 19508 - RNA, 20 nt, synthetic construct
  misc_feature 1..20: note = C9Orf72 CTCN PAM targeting sequence
  source 1..20: mol_type = other RNA
cactgctcctgccttcatgg

SEQ ID NO: 19509 - RNA, 20 nt, synthetic construct
  misc_feature 1..20: note = C9Orf72 CTCN PAM targeting sequence
  source 1..20: mol_type = other RNA
acccttgtctctcactgctc

SEQ ID NO: 19510 - RNA, 20 nt, synthetic construct
  misc_feature 1..20: note = C9Orf72 CTCN PAM targeting sequence
  source 1..20: mol_type = other RNA
ccacccttgtctctcactgc

SEQ ID NO: 19511 - RNA, 20 nt, synthetic construct
  misc_feature 1..20: note = C9Orf72 CTCN PAM targeting sequence
  source 1..20: mol_type = other RNA
tgtgcttcaccatggattgt

SEQ ID NO: 19512 - RNA, 20 nt, synthetic construct
  misc_feature 1..20: note = C9Orf72 CTCN PAM targeting sequence
  source 1..20: mol_type = other RNA
ttgacaaccttcaacccaca

SEQ ID NO: 19513 - RNA, 20 nt, synthetic construct
  misc_feature 1..20: note = C9Orf72 CTCN PAM targeting sequence
  source 1..20: mol_type = other RNA
aaaaaaaaaagccctcattg

SEQ ID NO: 19514 - RNA, 20 nt, synthetic construct
  misc_feature 1..20: note = C9Orf72 CTCN PAM targeting sequence
  source 1..20: mol_type = other RNA
gtctcaaaaaaaaaaagccc

SEQ ID NO: 19515 - RNA, 20 nt, synthetic construct
  misc_feature 1..20: note = C9Orf72 CTCN PAM targeting sequence
  source 1..20: mol_type = other RNA
ctctgtcgcccaggctggag

SEQ ID NO: 19516 - RNA, 20 nt, synthetic construct
  misc_feature 1..20: note = C9Orf72 CTCN PAM targeting sequence
  source 1..20: mol_type = other RNA
gtcgcccaggctggagtgca

SEQ ID NO: 19517 - RNA, 20 nt, synthetic construct
  misc_feature 1..20: note = C9Orf72 CTCN PAM targeting sequence
  source 1..20: mol_type = other RNA
agcctgggcgacagagtgag

SEQ ID NO: 19518 - RNA, 20 nt, synthetic construct
  misc_feature 1..20: note = C9Orf72 CTCN PAM targeting sequence
  source 1..20: mol_type = other RNA
gctcactgcaagctctgcct

SEQ ID NO: 19519 - RNA, 20 nt, synthetic construct
  misc_feature 1..20: note = C9Orf72 CTCN PAM targeting sequence
  source 1..20: mol_type = other RNA
ctgcaagctctgcctcccgg

SEQ ID NO: 19520 - RNA, 20 nt, synthetic construct
  misc_feature 1..20: note = C9Orf72 CTCN PAM targeting sequence
  source 1..20: mol_type = other RNA
gcctcccgggttcacgccat

SEQ ID NO: 19521 - RNA, 20 nt, synthetic construct
  misc_feature 1..20: note = C9Orf72 CTCN PAM targeting sequence
  source 1..20: mol_type = other RNA
cgggttcacgccattctcct

SEQ ID NO: 19522 - RNA, 20 nt, synthetic construct
  misc_feature 1..20: note = C9Orf72 CTCN PAM targeting sequence
  source 1..20: mol_type = other RNA
tgcctcagcctcccaagtag

SEQ ID NO: 19523 - RNA, 20 nt, synthetic construct
  misc_feature 1..20: note = C9Orf72 CTCN PAM targeting sequence
  source 1..20: mol_type = other RNA
gcctcccaagtagctgcgac

SEQ ID NO: 19524 - RNA, 20 nt, synthetic construct
  misc_feature 1..20: note = C9Orf72 CTCN PAM targeting sequence
  source 1..20: mol_type = other RNA
caagtagctgcgactacagg

SEQ ID NO: 19525 - RNA, 20 nt, synthetic construct
  misc_feature 1..20: note = C9Orf72 CTCN PAM targeting sequence
  source 1..20: mol_type = other RNA
atctcttgacctcgtgatcc

SEQ ID NO: 19526 - RNA, 20 nt, synthetic construct
  misc_feature 1..20: note = C9Orf72 CTCN PAM targeting sequence
  source 1..20: mol_type = other RNA
tgacctcgtgatccacctgc

SEQ ID NO: 19527 - RNA, 20 nt, synthetic construct
  misc_feature 1..20: note = C9Orf72 CTCN PAM targeting sequence
  source 1..20: mol_type = other RNA
tgatccacctgcctcggcct

SEQ ID NO: 19528 - RNA, 20 nt, synthetic construct
  misc_feature 1..20: note = C9Orf72 CTCN PAM targeting sequence
  source 1..20: mol_type = other RNA
gcctcccaaagtgctgggat

SEQ ID NO: 19529 - RNA, 20 nt, synthetic construct
  misc_feature 1..20: note = C9Orf72 CTCN PAM targeting sequence
  source 1..20: mol_type = other RNA
caaagtgctgggattacagg

SEQ ID NO: 19530 - RNA, 20 nt, synthetic construct
  misc_feature 1..20: note = C9Orf72 CTCN PAM targeting sequence
  source 1..20: mol_type = other RNA
tgcctgtaatcccagcactt

SEQ ID NO: 19531 - RNA, 20 nt, synthetic construct
  misc_feature 1..20: note = C9Orf72 CTCN PAM targeting sequence
  source 1..20: mol_type = other RNA
atgagggctttttaaggcaa

SEQ ID NO: 19532 - RNA, 20 nt, synthetic construct
  misc_feature 1..20: note = C9Orf72 CTCN PAM targeting sequence
  source 1..20: mol_type = other RNA
ttgaggccggacgtggtggc

SEQ ID NO: 19533 - RNA, 20 nt, synthetic construct
  misc_feature 1..20: note = C9Orf72 CTCN PAM targeting sequence
  source 1..20: mol_type = other RNA
tgacttgccttaaaaagccc

SEQ ID NO: 19534 - RNA, 20 nt, synthetic construct
  misc_feature 1..20: note = C9Orf72 CTCN PAM targeting sequence
  source 1..20: mol_type = other RNA
accataaatggagaaaattg

SEQ ID NO: 19535 - RNA, 20 nt, synthetic construct
  misc_feature 1..20: note = C9Orf72 CTCN PAM targeting sequence
  source 1..20: mol_type = other RNA
atttatggtagagtgatctt

SEQ ID NO: 19536 - RNA, 20 nt, synthetic construct
  misc_feature 1..20: note = C9Orf72 CTCN PAM targeting sequence
  source 1..20: mol_type = other RNA
cctttgcccaattttctcca

SEQ ID NO: 19537 - RNA, 20 nt, synthetic construct
  misc_feature 1..20: note = C9Orf72 CTCN PAM targeting sequence
  source 1..20: mol_type = other RNA
atgatttcacccactagcca

SEQ ID NO: 19538 - RNA, 20 nt, synthetic construct
  misc_feature 1..20: note = C9Orf72 CTCN PAM targeting sequence
  source 1..20: mol_type = other RNA
actgccactattaggacctt

SEQ ID NO: 19539 - RNA, 20 nt, synthetic construct
  misc_feature 1..20: note = C9Orf72 CTCN PAM targeting sequence
  source 1..20: mol_type = other RNA
atctccactgccactattag

SEQ ID NO: 19540 - RNA, 20 nt, synthetic construct
  misc_feature 1..20: note = C9Orf72 CTCN PAM targeting sequence
  source 1..20: mol_type = other RNA
tcccattttcccatcgtcca

SEQ ID NO: 19541 - RNA, 20 nt, synthetic construct
  misc_feature 1..20: note = C9Orf72 CTCN PAM targeting sequence
  source 1..20: mol_type = other RNA
ggagagcagctcacaggcaa

SEQ ID NO: 19542 - RNA, 20 nt, synthetic construct
  misc_feature 1..20: note = C9Orf72 CTCN PAM targeting sequence
  source 1..20: mol_type = other RNA
agaggcctcatcccattttc

SEQ ID NO: 19543 - RNA, 20 nt, synthetic construct
  misc_feature 1..20: note = C9Orf72 CTCN PAM targeting sequence
  source 1..20: mol_type = other RNA
ccagaggcctcatcccattt

SEQ ID NO: 19544 - RNA, 20 nt, synthetic construct
  misc_feature 1..20: note = C9Orf72 CTCN PAM targeting sequence
  source 1..20: mol_type = other RNA
caggcaatttttttttcatt

SEQ ID NO: 19545 - RNA, 20 nt, synthetic construct
  misc_feature 1..20: note = C9Orf72 CTCN PAM targeting sequence
  source 1..20: mol_type = other RNA
gccacatgcaatgaggtagt

SEQ ID NO: 19546 - RNA, 20 nt, synthetic construct
  misc_feature 1..20: note = C9Orf72 CTCN PAM targeting sequence
  source 1..20: mol_type = other RNA
ttgcatgtggcagagtgtgt

SEQ ID NO: 19547 - RNA, 20 nt, synthetic construct
  misc_feature 1..20: note = C9Orf72 CTCN PAM targeting sequence
  source 1..20: mol_type = other RNA
agctaaggaaataatcttgt

SEQ ID NO: 19548 - RNA, 20 nt, synthetic construct
  misc_feature 1..20: note = C9Orf72 CTCN PAM targeting sequence
  source 1..20: mol_type = other RNA
acatttaattgcttaatggt

SEQ ID NO: 19549 - RNA, 20 nt, synthetic construct
  misc_feature 1..20: note = C9Orf72 CTCN PAM targeting sequence
  source 1..20: mol_type = other RNA
atcgggtaggttctattctt

SEQ ID NO: 19550 - RNA, 20 nt, synthetic construct
  misc_feature 1..20: note = C9Orf72 CTCN PAM targeting sequence
  source 1..20: mol_type = other RNA
taaagaatagatgaggacac

SEQ ID NO: 19551 - RNA, 20 nt, synthetic construct
  misc_feature 1..20: note = C9Orf72 CTCN PAM targeting sequence
  source 1..20: mol_type = other RNA
tctattctttaagagtaaga

SEQ ID NO: 19552 - RNA, 20 nt, synthetic construct
  misc_feature 1..20: note = C9Orf72 CTCN PAM targeting sequence
  source 1..20: mol_type = other RNA
gtgtcctcatctattcttta

SEQ ID NO: 19553 - RNA, 20 nt, synthetic construct
  misc_feature 1..20: note = C9Orf72 CTCN PAM targeting sequence
  source 1..20: mol_type = other RNA
cttcctagctgtgtgacctt

SEQ ID NO: 19554 - RNA, 20 nt, synthetic construct
  misc_feature 1..20: note = C9Orf72 CTCN PAM targeting sequence
  source 1..20: mol_type = other RNA
gatccttattttctcacttc

SEQ ID NO: 19555 - RNA, 20 nt, synthetic construct
  misc_feature 1..20: note = C9Orf72 CTCN PAM targeting sequence
  source 1..20: mol_type = other RNA
tatcaatttacaatgacaaa

SEQ ID NO: 19556 - RNA, 20 nt, synthetic construct
  misc_feature 1..20: note = C9Orf72 CTCN PAM targeting sequence
  source 1..20: mol_type = other RNA
ataaaactcaatttgagcac

SEQ ID NO: 19557 - RNA, 20 nt, synthetic construct
  misc_feature 1..20: note = C9Orf72 CTCN PAM targeting sequence
  source 1..20: mol_type = other RNA
atttgagcactaaaactgac

SEQ ID NO: 19558 - RNA, 20 nt, synthetic construct
  misc_feature 1..20: note = C9Orf72 CTCN PAM targeting sequence
  source 1..20: mol_type = other RNA
aattgagttttatggagaaa

SEQ ID NO: 19559 - RNA, 20 nt, synthetic construct
  misc_feature 1..20: note = C9Orf72 CTCN PAM targeting sequence
  source 1..20: mol_type = other RNA
gcactactttttattgtgat

SEQ ID NO: 19560 - RNA, 20 nt, synthetic construct
  misc_feature 1..20: note = C9Orf72 CTCN PAM targeting sequence
  source 1..20: mol_type = other RNA
aaaaacatcttaggagtggt

SEQ ID NO: 19561 - RNA, 20 nt, synthetic construct
  misc_feature 1..20: note = C9Orf72 CTCN PAM targeting sequence
  source 1..20: mol_type = other RNA
taagatgtttttagagactt

SEQ ID NO: 19562 - RNA, 20 nt, synthetic construct
  misc_feature 1..20: note = C9Orf72 CTCN PAM targeting sequence
  source 1..20: mol_type = other RNA
cacccagcattttgcttcat

SEQ ID NO: 19563 - RNA, 20 nt, synthetic construct
  misc_feature 1..20: note = C9Orf72 CTCN PAM targeting sequence
  source 1..20: mol_type = other RNA
aaagaacaaaaaagcagaaa

SEQ ID NO: 19564 - RNA, 20 nt, synthetic construct
  misc_feature 1..20: note = C9Orf72 CTCN PAM targeting sequence
  source 1..20: mol_type = other RNA
ttcagctttcaaagcattcc

SEQ ID NO: 19565 - RNA, 20 nt, synthetic construct
  misc_feature 1..20: note = C9Orf72 CTCN PAM targeting sequence
  source 1..20: mol_type = other RNA
aactggcaccttctggcatt

SEQ ID NO: 19566 - RNA, 20 nt, synthetic construct
  misc_feature 1..20: note = C9Orf72 CTCN PAM targeting sequence
  source 1..20: mol_type = other RNA
gctcaggaatgactttctaa

SEQ ID NO: 19567 - RNA, 20 nt, synthetic construct
  misc_feature 1..20: note = C9Orf72 CTCN PAM targeting sequence
  source 1..20: mol_type = other RNA
ggaatgactttctaaatact

SEQ ID NO: 19568 - RNA, 20 nt, synthetic construct
  misc_feature 1..20: note = C9Orf72 CTCN PAM targeting sequence
  source 1..20: mol_type = other RNA
acagatggatacttactatt

SEQ ID NO: 19569 - RNA, 20 nt, synthetic construct
  misc_feature 1..20: note = C9Orf72 CTCN PAM targeting sequence
  source 1..20: mol_type = other RNA
tgctgaaatgtttttgttaa

SEQ ID NO: 19570 - RNA, 20 nt, synthetic construct
  misc_feature 1..20: note = C9Orf72 CTCN PAM targeting sequence
  source 1..20: mol_type = other RNA
tctcttgctgaaatgttttt

SEQ ID NO: 19571 - RNA, 20 nt, synthetic construct
  misc_feature 1..20: note = C9Orf72 CTCN PAM targeting sequence
  source 1..20: mol_type = other RNA
aaagtttcaaagattttagg

SEQ ID NO: 19572 - RNA, 20 nt, synthetic construct
  misc_feature 1..20: note = C9Orf72 CTCN PAM targeting sequence
  source 1..20: mol_type = other RNA
ttacatccatccagctaaca

SEQ ID NO: 19573 - RNA, 20 nt, synthetic construct
  misc_feature 1..20: note = C9Orf72 CTCN PAM targeting sequence
  source 1..20: mol_type = other RNA
gtgcctagcatggtgccagg

SEQ ID NO: 19574 - RNA, 20 nt, synthetic construct
  misc_feature 1..20: note = C9Orf72 CTCN PAM targeting sequence
  source 1..20: mol_type = other RNA
ccacctaggctaaagaacaa

SEQ ID NO: 19575 - RNA, 20 nt, synthetic construct
  misc_feature 1..20: note = C9Orf72 CTCN PAM targeting sequence
  source 1..20: mol_type = other RNA
aacacttacagaattaggtc

SEQ ID NO: 19576 - RNA, 20 nt, synthetic construct
  misc_feature 1..20: note = C9Orf72 CTCN PAM targeting sequence
  source 1..20: mol_type = other RNA
ccaacacttacagaattagg

SEQ ID NO: 19577 - RNA, 20 nt, synthetic construct
  misc_feature 1..20: note = C9Orf72 CTCN PAM targeting sequence
  source 1..20: mol_type = other RNA
tcataaaaatcgtaccacag

SEQ ID NO: 19578 - RNA, 20 nt, synthetic construct
  misc_feature 1..20: note = C9Orf72 CTCN PAM targeting sequence
  source 1..20: mol_type = other RNA
gataccctttttgctctcta

SEQ ID NO: 19579 - RNA, 20 nt, synthetic construct
  misc_feature 1..20: note = C9Orf72 CTCN PAM targeting sequence
  source 1..20: mol_type = other RNA
ctaatccatttctcttttcc

SEQ ID NO: 19580 - RNA, 20 nt, synthetic construct
  misc_feature 1..20: note = C9Orf72 CTCN PAM targeting sequence
  source 1..20: mol_type = other RNA
aatccatttctcttttcccc

SEQ ID NO: 19581 - RNA, 20 nt, synthetic construct
  misc_feature 1..20: note = C9Orf72 CTCN PAM targeting sequence
  source 1..20: mol_type = other RNA
tttccccccaacacagataa

SEQ ID NO: 19582 - RNA, 20 nt, synthetic construct
  misc_feature 1..20: note = C9Orf72 CTCN PAM targeting sequence
  source 1..20: mol_type = other RNA
aaaacttggacaccagcgct

SEQ ID NO: 19583 - RNA, 20 nt, synthetic construct
  misc_feature 1..20: note = C9Orf72 CTCN PAM targeting sequence
  source 1..20: mol_type = other RNA
gaccacaatggaattaaatt

SEQ ID NO: 19584 - RNA, 20 nt, synthetic construct
  misc_feature 1..20: note = C9Orf72 CTCN PAM targeting sequence
  source 1..20: mol_type = other RNA
aaatacggtctatcttggta

SEQ ID NO: 19585 - RNA, 20 nt, synthetic construct
  misc_feature 1..20: note = C9Orf72 CTCN PAM targeting sequence
  source 1..20: mol_type = other RNA
tggaaagaatgtgtgattta

SEQ ID NO: 19586 - RNA, 20 nt, synthetic construct
  misc_feature 1..20: note = C9Orf72 CTCN PAM targeting sequence
  source 1..20: mol_type = other RNA
acaaatgtcatttaagtcaa

SEQ ID NO: 19587 - RNA, 20 nt, synthetic construct
  misc_feature 1..20: note = C9Orf72 CTCN PAM targeting sequence
  source 1..20: mol_type = other RNA
aggctgcgtgcagtggctca

SEQ ID NO: 19588 - RNA, 20 nt, synthetic construct
  misc_feature 1..20: note = C9Orf72 CTCN PAM targeting sequence
  source 1..20: mol_type = other RNA
tgcctgtaatcccagcactt

SEQ ID NO: 19589 - RNA, 20 nt, synthetic construct
  misc_feature 1..20: note = C9Orf72 CTCN PAM targeting sequence
  source 1..20: mol_type = other RNA
caaagtgctgggattacagg

SEQ ID NO: 19590 - RNA, 20 nt, synthetic construct
  misc_feature 1..20: note = C9Orf72 CTCN PAM targeting sequence
  source 1..20: mol_type = other RNA
gcctcccaaagtgctgggat

SEQ ID NO: 19591 - RNA, 20 nt, synthetic construct
  misc_feature 1..20: note = C9Orf72 CTCN PAM targeting sequence
  source 1..20: mol_type = other RNA
tgatctgcctgcctcggcct

SEQ ID NO: 19592 - RNA, 20 nt, synthetic construct
  misc_feature 1..20: note = C9Orf72 CTCN PAM targeting sequence
  source 1..20: mol_type = other RNA
tgacctcgtgatctgcctgc

SEQ ID NO: 19593 - RNA, 20 nt, synthetic construct
  misc_feature 1..20: note = C9Orf72 CTCN PAM targeting sequence
  source 1..20: mol_type = other RNA
atctcctgacctcgtgatct

SEQ ID NO: 19594 - RNA, 20 nt, synthetic construct
  misc_feature 1..20: note = C9Orf72 CTCN PAM targeting sequence
  source 1..20: mol_type = other RNA
actaaaaatacaaaaaaatt

SEQ ID NO: 19595 - RNA, 20 nt, synthetic construct
  misc_feature 1..20: note = C9Orf72 CTCN PAM targeting sequence
  source 1..20: mol_type = other RNA
ccagtagctgggactacagg

SEQ ID NO: 19596 - RNA, 20 nt, synthetic construct
  misc_feature 1..20: note = C9Orf72 CTCN PAM targeting sequence
  source 1..20: mol_type = other RNA
tgcttcagcctccccagtag

SEQ ID NO: 19597 - RNA, 20 nt, synthetic construct
  misc_feature 1..20: note = C9Orf72 CTCN PAM targeting sequence
  source 1..20: mol_type = other RNA
caggttcacgccattctcct

SEQ ID NO: 19598 - RNA, 20 nt, synthetic construct
  misc_feature 1..20: note = C9Orf72 CTCN PAM targeting sequence
  source 1..20: mol_type = other RNA
gcctcccaggttcacgccat

SEQ ID NO: 19599 - RNA, 20 nt, synthetic construct
  misc_feature 1..20: note = C9Orf72 CTCN PAM targeting sequence
  source 1..20: mol_type = other RNA
ctgcaagctccgcctcccag

SEQ ID NO: 19600 - RNA, 20 nt, synthetic construct
  misc_feature 1..20: note = C9Orf72 CTCN PAM targeting sequence
  source 1..20: mol_type = other RNA
gctcactgcaagctccgcct

SEQ ID NO: 19601 - RNA, 20 nt, synthetic construct
  misc_feature 1..20: note = C9Orf72 CTCN PAM targeting sequence
  source 1..20: mol_type = other RNA
agcctgggcgacaaaaaaaa

SEQ ID NO: 19602 - RNA, 20 nt, synthetic construct
  misc_feature 1..20: note = C9Orf72 CTCN PAM targeting sequence
  source 1..20: mol_type = other RNA
aaacataattgtggacttgt

SEQ ID NO: 19603 - RNA, 20 nt, synthetic construct
  misc_feature 1..20: note = C9Orf72 CTCN PAM targeting sequence
  source 1..20: mol_type = other RNA
tagctgtgtcaaaatagatg

SEQ ID NO: 19604 - RNA, 20 nt, synthetic construct
  misc_feature 1..20: note = C9Orf72 CTCN PAM targeting sequence
  source 1..20: mol_type = other RNA
tttatcattataaaatgatc

SEQ ID NO: 19605 - RNA, 20 nt, synthetic construct
  misc_feature 1..20: note = C9Orf72 CTCN PAM targeting sequence
  source 1..20: mol_type = other RNA
gaaatctattttgtttcata

SEQ ID NO: 19606 - RNA, 20 nt, synthetic construct
  misc_feature 1..20: note = C9Orf72 CTCN PAM targeting sequence
  source 1..20: mol_type = other RNA
agttttcttctaattaccaa

SEQ ID NO: 19607 - RNA, 20 nt, synthetic construct
  misc_feature 1..20: note = C9Orf72 CTCN PAM targeting sequence
  source 1..20: mol_type = other RNA
atccttttacttttaatctg

SEQ ID NO: 19608 - RNA, 20 nt, synthetic construct
  misc_feature 1..20: note = C9Orf72 CTCN PAM targeting sequence
  source 1..20: mol_type = other RNA
catatttatttgtagagaga

SEQ ID NO: 19609 - RNA, 20 nt, synthetic construct
  misc_feature 1..20: note = C9Orf72 CTCN PAM targeting sequence
  source 1..20: mol_type = other RNA
acaaataaatatgtgaggta

SEQ ID NO: 19610 - RNA, 20 nt, synthetic construct
  misc_feature 1..20: note = C9Orf72 CTCN PAM targeting sequence
  source 1..20: mol_type = other RNA
ctacaaataaatatgtgagg

SEQ ID NO: 19611 - RNA, 20 nt, synthetic construct
  misc_feature 1..20: note = C9Orf72 CTCN PAM targeting sequence
  source 1..20: mol_type = other RNA
tgatctttagcttattcctc

SEQ ID NO: 19612 - RNA, 20 nt, synthetic construct
  misc_feature 1..20: note = C9Orf72 CTCN PAM targeting sequence
  source 1..20: mol_type = other RNA
tatctaactgaataagttgt

SEQ ID NO: 19613 - RNA, 20 nt, synthetic construct
  misc_feature 1..20: note = C9Orf72 CTCN PAM targeting sequence
  source 1..20: mol_type = other RNA
tgaacttattcctcctgtct

SEQ ID NO: 19614 - RNA, 20 nt, synthetic construct
  misc_feature 1..20: note = C9Orf72 CTCN PAM targeting sequence
  source 1..20: mol_type = other RNA
tgtctaactttgaccaacat

SEQ ID NO: 19615 - RNA, 20 nt, synthetic construct
  misc_feature 1..20: note = C9Orf72 CTCN PAM targeting sequence
  source 1..20: mol_type = other RNA
ccagcccaccgcctctcccc

SEQ ID NO: 19616 - RNA, 20 nt, synthetic construct
  misc_feature 1..20: note = C9Orf72 CTCN PAM targeting sequence
  source 1..20: mol_type = other RNA
ccccagcacctggtaaccat

SEQ ID NO: 19617 - RNA, 20 nt, synthetic construct
  misc_feature 1..20: note = C9Orf72 CTCN PAM targeting sequence
  source 1..20: mol_type = other RNA
ccagcacctggtaaccatgt

SEQ ID NO: 19618 - RNA, 20 nt, synthetic construct
  misc_feature 1..20: note = C9Orf72 CTCN PAM targeting sequence
  source 1..20: mol_type = other RNA
ctgcttctatgagttccaag

SEQ ID NO: 19619 - RNA, 20 nt, synthetic construct
  misc_feature 1..20: note = C9Orf72 CTCN PAM targeting sequence
  source 1..20: mol_type = other RNA
gcttctatgagttccaagtt

SEQ ID NO: 19620 - RNA, 20 nt, synthetic construct
  misc_feature 1..20: note = C9Orf72 CTCN PAM targeting sequence
  source 1..20: mol_type = other RNA
tagaagcagagagtaaaaac

SEQ ID NO: 19621 - RNA, 20 nt, synthetic construct
  misc_feature 1..20: note = C9Orf72 CTCN PAM targeting sequence
  source 1..20: mol_type = other RNA
cttacacacagaattgaaaa

SEQ ID NO: 19622 - RNA, 20 nt, synthetic construct
  misc_feature 1..20: note = C9Orf72 CTCN PAM targeting sequence
  source 1..20: mol_type = other RNA
gacttttaattggggtgttt

SEQ ID NO: 19623 - RNA, 20 nt, synthetic construct
  misc_feature 1..20: note = C9Orf72 CTCN PAM targeting sequence
  source 1..20: mol_type = other RNA
acactttattgttttttaat

SEQ ID NO: 19624 - RNA, 20 nt, synthetic construct
  misc_feature 1..20: note = C9Orf72 CTCN PAM targeting sequence
  source 1..20: mol_type = other RNA
ttctaatttaccagtttata

SEQ ID NO: 19625 - RNA, 20 nt, synthetic construct
  misc_feature 1..20: note = C9Orf72 CTCN PAM targeting sequence
  source 1..20: mol_type = other RNA
ttgatttattttagtggttg

SEQ ID NO: 19626 - RNA, 20 nt, synthetic construct
  misc_feature 1..20: note = C9Orf72 CTCN PAM targeting sequence
  source 1..20: mol_type = other RNA
ttacttttggatttttttat

SEQ ID NO: 19627 - RNA, 20 nt, synthetic construct
  misc_feature 1..20: note = C9Orf72 CTCN PAM targeting sequence
  source 1..20: mol_type = other RNA
agcttgtaattggggcattt

SEQ ID NO: 19628 - RNA, 20 nt, synthetic construct
  misc_feature 1..20: note = C9Orf72 CTCN PAM targeting sequence
  source 1..20: mol_type = other RNA
ttaaatcctctggtgaagta

SEQ ID NO: 19629 - RNA, 20 nt, synthetic construct
  misc_feature 1..20: note = C9Orf72 CTCN PAM targeting sequence
  source 1..20: mol_type = other RNA
ggtgaagtacgtattatcac

SEQ ID NO: 19630 - RNA, 20 nt, synthetic construct
  misc_feature 1..20: note = C9Orf72 CTCN PAM targeting sequence
  source 1..20: mol_type = other RNA
atttccaatatttacaaaat

SEQ ID NO: 19631 - RNA, 20 nt, synthetic construct
  misc_feature 1..20: note = C9Orf72 CTCN PAM targeting sequence
  source 1..20: mol_type = other RNA
aagcagcacagcagggattc

SEQ ID NO: 19632 - RNA, 20 nt, synthetic construct
  misc_feature 1..20: note = C9Orf72 CTCN PAM targeting sequence
  source 1..20: mol_type = other RNA
ggctctgaatagtgcaagta

SEQ ID NO: 19633 - RNA, 20 nt, synthetic construct
  misc_feature 1..20: note = C9Orf72 CTCN PAM targeting sequence
  source 1..20: mol_type = other RNA
gaatagtgcaagtagacctg

SEQ ID NO: 19634 - RNA, 20 nt, synthetic construct
  misc_feature 1..20: note = C9Orf72 CTCN PAM targeting sequence
  source 1..20: mol_type = other RNA
cctttcaattcagctacact

SEQ ID NO: 19635 - RNA, 20 nt, synthetic construct
  misc_feature 1..20: note = C9Orf72 CTCN PAM targeting sequence
  source 1..20: mol_type = other RNA
tttcaattcagctacactga

SEQ ID NO: 19636 - RNA, 20 nt, synthetic construct
  misc_feature 1..20: note = C9Orf72 CTCN PAM targeting sequence
  source 1..20: mol_type = other RNA
gtgtagctgaattgaaagga

SEQ ID NO: 19637 - RNA, 20 nt, synthetic construct
  misc_feature 1..20: note = C9Orf72 CTCN PAM targeting sequence
  source 1..20: mol_type = other RNA
atgtaactggtactcagtgt

SEQ ID NO: 19638 - RNA, 20 nt, synthetic construct
  misc_feature 1..20: note = C9Orf72 CTCN PAM targeting sequence
  source 1..20: mol_type = other RNA
taacttagtaactccatgta

SEQ ID NO: 19639 - RNA, 20 nt, synthetic construct
  misc_feature 1..20: note = C9Orf72 CTCN PAM targeting sequence
  source 1..20: mol_type = other RNA
tttgtaaaatggaagtaata

SEQ ID NO: 19640 - RNA, 20 nt, synthetic construct
  misc_feature 1..20: note = C9Orf72 CTCN PAM targeting sequence
  source 1..20: mol_type = other RNA
atttaacacacagtaacact

SEQ ID NO: 19641 - RNA, 20 nt, synthetic construct
  misc_feature 1..20: note = C9Orf72 CTCN PAM targeting sequence
  source 1..20: mol_type = other RNA
tatgatctgcagggtatagc

SEQ ID NO: 19642 - RNA, 20 nt, synthetic construct
  misc_feature 1..20: note = C9Orf72 CTCN PAM targeting sequence
  source 1..20: mol_type = other RNA
tatataatactattttgatt

SEQ ID NO: 19643 - RNA, 20 nt, synthetic construct
  misc_feature 1..20: note = C9Orf72 CTCN PAM targeting sequence
  source 1..20: mol_type = other RNA
aagaagaaaccaaaacttca

SEQ ID NO: 19644 - RNA, 20 nt, synthetic construct
  misc_feature 1..20: note = C9Orf72 CTCN PAM targeting sequence
  source 1..20: mol_type = other RNA
catcccaactattctatttt

SEQ ID NO: 19645 - RNA, 20 nt, synthetic construct
  misc_feature 1..20: note = C9Orf72 CTCN PAM targeting sequence
  source 1..20: mol_type = other RNA
tcccaactattctattttca

SEQ ID NO: 19646 - RNA, 20 nt, synthetic construct
  misc_feature 1..20: note = C9Orf72 CTCN PAM targeting sequence
  source 1..20: mol_type = other RNA
aagaaaaagtttttttttga

SEQ ID NO: 19647 - RNA, 20 nt, synthetic construct
  misc_feature 1..20: note = C9Orf72 CTCN PAM targeting sequence
  source 1..20: mol_type = other RNA
ggatttcattttgatttttc

SEQ ID NO: 19648 - RNA, 20 nt, synthetic construct
  misc_feature 1..20: note = C9Orf72 CTCN PAM targeting sequence
  source 1..20: mol_type = other RNA
ctggatttcattttgatttt

SEQ ID NO: 19649 - RNA, 20 nt, synthetic construct
  misc_feature 1..20: note = C9Orf72 CTCN PAM targeting sequence
  source 1..20: mol_type = other RNA
ttcagttgttcattcagaaa

SEQ ID NO: 19650 - RNA, 20 nt, synthetic construct
  misc_feature 1..20: note = C9Orf72 CTCN PAM targeting sequence
  source 1..20: mol_type = other RNA
atttaggagaaaagatatat

SEQ ID NO: 19651 - RNA, 20 nt, synthetic construct
  misc_feature 1..20: note = C9Orf72 CTCN PAM targeting sequence
  source 1..20: mol_type = other RNA
taaatggagaattttgaata

SEQ ID NO: 19652 - RNA, 20 nt, synthetic construct
  misc_feature 1..20: note = C9Orf72 CTCN PAM targeting sequence
  source 1..20: mol_type = other RNA
gtcatttaaaaaatatataa

SEQ ID NO: 19653 - RNA, 20 nt, synthetic construct
  misc_feature 1..20: note = C9Orf72 CTCN PAM targeting sequence
  source 1..20: mol_type = other RNA
attacctttatccctttctt

SEQ ID NO: 19654 - RNA, 20 nt, synthetic construct
  misc_feature 1..20: note = C9Orf72 CTCN PAM targeting sequence
  source 1..20: mol_type = other RNA
gccaaagtagcacctaggaa

SEQ ID NO: 19655 - RNA, 20 nt, synthetic construct
  misc_feature 1..20: note = C9Orf72 CTCN PAM targeting sequence
  source 1..20: mol_type = other RNA
tgctattccttatagcctat

SEQ ID NO: 19656 - RNA, 20 nt, synthetic construct
  misc_feature 1..20: note = C9Orf72 CTCN PAM targeting sequence
  source 1..20: mol_type = other RNA
aggaactattttctgtttct

SEQ ID NO: 19657 - RNA, 20 nt, synthetic construct
  misc_feature 1..20: note = C9Orf72 CTCN PAM targeting sequence
  source 1..20: mol_type = other RNA
aaggcattttataatctcag

SEQ ID NO: 19658 - RNA, 20 nt, synthetic construct
  misc_feature 1..20: note = C9Orf72 CTCN PAM targeting sequence
  source 1..20: mol_type = other RNA
gagttgcaatgattgccaaa

SEQ ID NO: 19659 - RNA, 20 nt, synthetic construct
  misc_feature 1..20: note = C9Orf72 CTCN PAM targeting sequence
  source 1..20: mol_type = other RNA
gagattataaaatgccttag

SEQ ID NO: 19660 - RNA, 20 nt, synthetic construct
  misc_feature 1..20: note = C9Orf72 CTCN PAM targeting sequence
  source 1..20: mol_type = other RNA
ttagaaaatctaattacttg

SEQ ID NO: 19661 - RNA, 20 nt, synthetic construct
  misc_feature 1..20: note = C9Orf72 CTCN PAM targeting sequence
  source 1..20: mol_type = other RNA
tgtgccttttttctccttag

SEQ ID NO: 19662 - RNA, 20 nt, synthetic construct
  misc_feature 1..20: note = C9Orf72 CTCN PAM targeting sequence
  source 1..20: mol_type = other RNA
aaaataatgaaaattaattt

SEQ ID NO: 19663 - RNA, 20 nt, synthetic construct
  misc_feature 1..20: note = C9Orf72 CTCN PAM targeting sequence
  source 1..20: mol_type = other RNA
gtaaaaggaaattgtatttt

SEQ ID NO: 19664 - RNA, 20 nt, synthetic construct
  misc_feature 1..20: note = C9Orf72 CTCN PAM targeting sequence
  source 1..20: mol_type = other RNA
actacatagaatatcaacaa

SEQ ID NO: 19665 - RNA, 20 nt, synthetic construct
  misc_feature 1..20: note = C9Orf72 CTCN PAM targeting sequence
  source 1..20: mol_type = other RNA
atagtccttgttcctggtga

SEQ ID NO: 19666 - RNA, 20 nt, synthetic construct
  misc_feature 1..20: note = C9Orf72 CTCN PAM targeting sequence
  source 1..20: mol_type = other RNA
tcctatgttcaagctcactt

SEQ ID NO: 19667 - RNA, 20 nt, synthetic construct
  misc_feature 1..20: note = C9Orf72 CTCN PAM targeting sequence
  source 1..20: mol_type = other RNA
ctttctttctgtggaattga

SEQ ID NO: 19668 - RNA, 20 nt, synthetic construct
  misc_feature 1..20: note = C9Orf72 CTCN PAM targeting sequence
  source 1..20: mol_type = other RNA
agttttcagttgattgcaga

SEQ ID NO: 19669 - RNA, 20 nt, synthetic construct
  misc_feature 1..20: note = C9Orf72 CTCN PAM targeting sequence
  source 1..20: mol_type = other RNA
gatttcaccttgacacatgt

SEQ ID NO: 19670 - RNA, 20 nt, synthetic construct
  misc_feature 1..20: note = C9Orf72 CTCN PAM targeting sequence
  source 1..20: mol_type = other RNA
tttcctagatttatgctttt

SEQ ID NO: 19671 - RNA, 20 nt, synthetic construct
  misc_feature 1..20: note = C9Orf72 CTCN PAM targeting sequence
  source 1..20: mol_type = other RNA
caggctcttgtgagaactgt

SEQ ID NO: 19672 - RNA, 20 nt, synthetic construct
  misc_feature 1..20: note = C9Orf72 CTCN PAM targeting sequence
  source 1..20: mol_type = other RNA
tgtgagaactgtagtgtaac

SEQ ID NO: 19673 - RNA, 20 nt, synthetic construct
  misc_feature 1..20: note = C9Orf72 CTCN PAM targeting sequence
  source 1..20: mol_type = other RNA
caagagcctgtgaggggatg

SEQ ID NO: 19674 - RNA, 20 nt, synthetic construct
  misc_feature 1..20: note = C9Orf72 CTCN PAM targeting sequence
  source 1..20: mol_type = other RNA
gcaattgcagttaagtaagt

SEQ ID NO: 19675 - RNA, 20 nt, synthetic construct
  misc_feature 1..20: note = C9Orf72 CTCN PAM targeting sequence
  source 1..20: mol_type = other RNA
cagcaattgcagttaagtaa

SEQ ID NO: 19676 - RNA, 20 nt, synthetic construct
  misc_feature 1..20: note = C9Orf72 CTCN PAM targeting sequence
  source 1..20: mol_type = other RNA
agaattctgctctcagcaat

SEQ ID NO: 19677 - RNA, 20 nt, synthetic construct
  misc_feature 1..20: note = C9Orf72 CTCN PAM targeting sequence
  source 1..20: mol_type = other RNA
gtggtgtggggaaacgttcc

SEQ ID NO: 19678 - RNA, 20 nt, synthetic construct
  misc_feature 1..20: note = C9Orf72 CTCN PAM targeting sequence
  source 1..20: mol_type = other RNA
ttcttgcacactagtgtaga

SEQ ID NO: 19679 - RNA, 20 nt, synthetic construct
  misc_feature 1..20: note = C9Orf72 CTCN PAM targeting sequence
  source 1..20: mol_type = other RNA
tttatctttggaagaccttt

SEQ ID NO: 19680 - RNA, 20 nt, synthetic construct
  misc_feature 1..20: note = C9Orf72 CTCN PAM targeting sequence
  source 1..20: mol_type = other RNA
gccagagccattattatgtt

SEQ ID NO: 19681 - RNA, 20 nt, synthetic construct
  misc_feature 1..20: note = C9Orf72 CTCN PAM targeting sequence
  source 1..20: mol_type = other RNA
ggctgagaaaattaaaccag

SEQ ID NO: 19682 - RNA, 20 nt, synthetic construct
  misc_feature 1..20: note = C9Orf72 CTCN PAM targeting sequence
  source 1..20: mol_type = other RNA
gctgttaaatcaaggtctat

SEQ ID NO: 19683 - RNA, 20 nt, synthetic construct
  misc_feature 1..20: note = C9Orf72 CTCN PAM targeting sequence
  source 1..20: mol_type = other RNA
tcggaacctgaagatagacc

SEQ ID NO: 19684 - RNA, 20 nt, synthetic construct
  misc_feature 1..20: note = C9Orf72 CTCN PAM targeting sequence
  source 1..20: mol_type = other RNA
tacacggaagaaaaaccttt

SEQ ID NO: 19685 - RNA, 20 nt, synthetic construct
  misc_feature 1..20: note = C9Orf72 CTCN PAM targeting sequence
  source 1..20: mol_type = other RNA
cgtatcgtcttctatatatt

SEQ ID NO: 19686 - RNA, 20 nt, synthetic construct
  misc_feature 1..20: note = C9Orf72 CTCN PAM targeting sequence
  source 1..20: mol_type = other RNA
gaagtactttccttgcacag

SEQ ID NO: 19687 - RNA, 20 nt, synthetic construct
  misc_feature 1..20: note = C9Orf72 CTCN PAM targeting sequence
  source 1..20: mol_type = other RNA
cagaagtactttccttgcac

SEQ ID NO: 19688 - RNA, 20 nt, synthetic construct
  misc_feature 1..20: note = C9Orf72 CTCN PAM targeting sequence
  source 1..20: mol_type = other RNA
ctgcaggtctttcagctgaa

SEQ ID NO: 19689 - RNA, 20 nt, synthetic construct
  misc_feature 1..20: note = C9Orf72 CTCN PAM targeting sequence
  source 1..20: mol_type = other RNA
ccctgcaggtctttcagctg

SEQ ID NO: 19690 - RNA, 20 nt, synthetic construct
  misc_feature 1..20: note = C9Orf72 CTCN PAM targeting sequence
  source 1..20: mol_type = other RNA
cattctactcgtacagaagt

SEQ ID NO: 19691 - RNA, 20 nt, synthetic construct
  misc_feature 1..20: note = C9Orf72 CTCN PAM targeting sequence
  source 1..20: mol_type = other RNA
tacagaagtttctatgacag

SEQ ID NO: 19692 - RNA, 20 nt, synthetic construct
  misc_feature 1..20: note = C9Orf72 CTCN PAM targeting sequence
  source 1..20: mol_type = other RNA
ttaaccatttccactgatgc

SEQ ID NO: 19693 - RNA, 20 nt, synthetic construct
  misc_feature 1..20: note = C9Orf72 CTCN PAM targeting sequence
  source 1..20: mol_type = other RNA
tgttagggggcatcagtgga

SEQ ID NO: 19694 - RNA, 20 nt, synthetic construct
  misc_feature 1..20: note = C9Orf72 CTCN PAM targeting sequence
  source 1..20: mol_type = other RNA
aaaaaaaaaaaaaatatcag

SEQ ID NO: 19695 - RNA, 20 nt, synthetic construct
  misc_feature 1..20: note = C9Orf72 CTCN PAM targeting sequence
  source 1..20: mol_type = other RNA
gtctcaaaaaaaaaaaaaaa

SEQ ID NO: 19696 - RNA, 20 nt, synthetic construct
  misc_feature 1..20: note = C9Orf72 CTCN PAM targeting sequence
  source 1..20: mol_type = other RNA
gtcaccaggctaaagtgcag

SEQ ID NO: 19697 - RNA, 20 nt, synthetic construct
  misc_feature 1..20: note = C9Orf72 CTCN PAM targeting sequence
  source 1..20: mol_type = other RNA
ctgcaacctacacctcctgg

SEQ ID NO: 19698 - RNA, 20 nt, synthetic construct
  misc_feature 1..20: note = C9Orf72 CTCN PAM targeting sequence
  source 1..20: mol_type = other RNA
tgggttcaagcgattctcct

SEQ ID NO: 19699 - RNA, 20 nt, synthetic construct
  misc_feature 1..20: note = C9Orf72 CTCN PAM targeting sequence
  source 1..20: mol_type = other RNA
tgcctcagcctcccaggtag

SEQ ID NO: 19700 - RNA, 20 nt, synthetic construct
  misc_feature 1..20: note = C9Orf72 CTCN PAM targeting sequence
  source 1..20: mol_type = other RNA
gcctcccaggtagctgggat

SEQ ID NO: 19701 - RNA, 20 nt, synthetic construct
  misc_feature 1..20: note = C9Orf72 CTCN PAM targeting sequence
  source 1..20: mol_type = other RNA
caggtagctgggattacagg

SEQ ID NO: 19702 - RNA, 20 nt, synthetic construct
  misc_feature 1..20: note = C9Orf72 CTCN PAM targeting sequence
  source 1..20: mol_type = other RNA
actaagtatacaaaaattag

SEQ ID NO: 19703 - RNA, 20 nt, synthetic construct
  misc_feature 1..20: note = C9Orf72 CTCN PAM targeting sequence
  source 1..20: mol_type = other RNA
atctcctgaccttgtgatcc

SEQ ID NO: 19704 - RNA, 20 nt, synthetic construct
  misc_feature 1..20: note = C9Orf72 CTCN PAM targeting sequence
  source 1..20: mol_type = other RNA
tgaccttgtgatccacccac

SEQ ID NO: 19705 - RNA, 20 nt, synthetic construct
  misc_feature 1..20: note = C9Orf72 CTCN PAM targeting sequence
  source 1..20: mol_type = other RNA
gactcccaaagtgctgggat

SEQ ID NO: 19706 - RNA, 20 nt, synthetic construct
  misc_feature 1..20: note = C9Orf72 CTCN PAM targeting sequence
  source 1..20: mol_type = other RNA
caaagtgctgggattacagg

SEQ ID NO: 19707 - RNA, 20 nt, synthetic construct
  misc_feature 1..20: note = C9Orf72 CTCN PAM targeting sequence
  source 1..20: mol_type = other RNA
tacataagttatttcgtatt

SEQ ID NO: 19708 - RNA, 20 nt, synthetic construct
  misc_feature 1..20: note = C9Orf72 CTCN PAM targeting sequence
  source 1..20: mol_type = other RNA
tagaagatgagcctatggtt

SEQ ID NO: 19709 - RNA, 20 nt, synthetic construct
  misc_feature 1..20: note = C9Orf72 CTCN PAM targeting sequence
  source 1..20: mol_type = other RNA
tcttctaggagcttcaatgt

SEQ ID NO: 19710 - RNA, 20 nt, synthetic construct
  misc_feature 1..20: note = C9Orf72 CTCN PAM targeting sequence
  source 1..20: mol_type = other RNA
aaaccataggctcatcttct

SEQ ID NO: 19711 - RNA, 20 nt, synthetic construct
  misc_feature 1..20: note = C9Orf72 CTCN PAM targeting sequence
  source 1..20: mol_type = other RNA
accccctgcaaaagtacagg

SEQ ID NO: 19712 - RNA, 20 nt, synthetic construct
  misc_feature 1..20: note = C9Orf72 CTCN PAM targeting sequence
  source 1..20: mol_type = other RNA
tacccacccactccaccccc

SEQ ID NO: 19713 - RNA, 20 nt, synthetic construct
  misc_feature 1..20: note = C9Orf72 CTCN PAM targeting sequence
  source 1..20: mol_type = other RNA
tcatatgcacacattctact

SEQ ID NO: 19714 - RNA, 20 nt, synthetic construct
  misc_feature 1..20: note = C9Orf72 CTCN PAM targeting sequence
  source 1..20: mol_type = other RNA
acctcatcatatgcacacat

SEQ ID NO: 19715 - RNA, 20 nt, synthetic construct
  misc_feature 1..20: note = C9Orf72 CTCN PAM targeting sequence
  source 1..20: mol_type = other RNA
ccacctcatcatatgcacac

SEQ ID NO: 19716 - RNA, 20 nt, synthetic construct
  misc_feature 1..20: note = C9Orf72 CTCN PAM targeting sequence
  source 1..20: mol_type = other RNA
cactctccacctcatcatat

SEQ ID NO: 19717 - RNA, 20 nt, synthetic construct
  misc_feature 1..20: note = C9Orf72 CTCN PAM targeting sequence
  source 1..20: mol_type = other RNA
agctgacataaaatccctcc

SEQ ID NO: 19718 - RNA, 20 nt, synthetic construct
  misc_feature 1..20: note = C9Orf72 CTCN PAM targeting sequence
  source 1..20: mol_type = other RNA
tagatctcaatccaaaattt

SEQ ID NO: 19719 - RNA, 20 nt, synthetic construct
  misc_feature 1..20: note = C9Orf72 CTCN PAM targeting sequence
  source 1..20: mol_type = other RNA
atccaaaatttctagtaaac

SEQ ID NO: 19720 - RNA, 20 nt, synthetic construct
  misc_feature 1..20: note = C9Orf72 CTCN PAM targeting sequence
  source 1..20: mol_type = other RNA
ttatttcaaagctttatcta

SEQ ID NO: 19721 - RNA, 20 nt, synthetic construct
  misc_feature 1..20: note = C9Orf72 CTCN PAM targeting sequence
  source 1..20: mol_type = other RNA
aaaatatttttgaaacatag

SEQ ID NO: 19722 - RNA, 20 nt, synthetic construct
  misc_feature 1..20: note = C9Orf72 CTCN PAM targeting sequence
  source 1..20: mol_type = other RNA
ctttctcaaaaaaaaaaaaa

SEQ ID NO: 19723 - RNA, 20 nt, synthetic construct
  misc_feature 1..20: note = C9Orf72 CTCN PAM targeting sequence
  source 1..20: mol_type = other RNA
aaaaaaaaaaaaaaacttac

SEQ ID NO: 19724 - RNA, 20 nt, synthetic construct
  misc_feature 1..20: note = C9Orf72 CTCN PAM targeting sequence
  source 1..20: mol_type = other RNA
taattgttaatatacaggct

SEQ ID NO: 19725 - RNA, 20 nt, synthetic construct
  misc_feature 1..20: note = C9Orf72 CTCN PAM targeting sequence
  source 1..20: mol_type = other RNA
tccccattaataagtcaaaa

SEQ ID NO: 19726 - RNA, 20 nt, synthetic construct
  misc_feature 1..20: note = C9Orf72 CTCN PAM targeting sequence
  source 1..20: mol_type = other RNA
attcttaattctatcatttt

SEQ ID NO: 19727 - RNA, 20 nt, synthetic construct
  misc_feature 1..20: note = C9Orf72 CTCN PAM targeting sequence
  source 1..20: mol_type = other RNA
atcatagagtatatgttata

SEQ ID NO: 19728 - RNA, 20 nt, synthetic construct
  misc_feature 1..20: note = C9Orf72 CTCN PAM targeting sequence
  source 1..20: mol_type = other RNA
atgatagagtgtaatatatt

SEQ ID NO: 19729 - RNA, 20 nt, synthetic construct
  misc_feature 1..20: note = C9Orf72 CTCN PAM targeting sequence
  source 1..20: mol_type = other RNA
acataacataatagggtttt

SEQ ID NO: 19730 - RNA, 20 nt, synthetic construct
  misc_feature 1..20: note = C9Orf72 CTCN PAM targeting sequence
  source 1..20: mol_type = other RNA
tactatatatatatacacac

SEQ ID NO: 19731 - RNA, 20 nt, synthetic construct
  misc_feature 1..20: note = C9Orf72 CTCN PAM targeting sequence
  source 1..20: mol_type = other RNA
tgtcctagatttatgcttcg

SEQ ID NO: 19732 - RNA, 20 nt, synthetic construct
  misc_feature 1..20: note = C9Orf72 CTCN PAM targeting sequence
  source 1..20: mol_type = other RNA
cagactcttctgagaactgt

SEQ ID NO: 19733 - RNA, 20 nt, synthetic construct
  misc_feature 1..20: note = C9Orf72 CTCN PAM targeting sequence
  source 1..20: mol_type = other RNA
tctgagaactgtagtgtaac

SEQ ID NO: 19734 - RNA, 20 nt, synthetic construct
  misc_feature 1..20: note = C9Orf72 CTCN PAM targeting sequence
  source 1..20: mol_type = other RNA
gaagagtctgtgagggcatg

SEQ ID NO: 19735 - RNA, 20 nt, synthetic construct
  misc_feature 1..20: note = C9Orf72 CTCN PAM targeting sequence
  source 1..20: mol_type = other RNA
gcaattgcagttaagttagt

SEQ ID NO: 19736 - RNA, 20 nt, synthetic construct
  misc_feature 1..20: note = C9Orf72 CTCN PAM targeting sequence
  source 1..20: mol_type = other RNA
ggggcatgatccaggggaat

SEQ ID NO: 19737 - RNA, 20 nt, synthetic construct
  misc_feature 1..20: note = C9Orf72 CTCN PAM targeting sequence
  source 1..20: mol_type = other RNA
gacaatctcaagttcaacat

SEQ ID NO: 19738 - RNA, 20 nt, synthetic construct
  misc_feature 1..20: note = C9Orf72 CTCN PAM targeting sequence
  source 1..20: mol_type = other RNA
agttcaacatttacctgatc

SEQ ID NO: 19739 - RNA, 20 nt, synthetic construct
  misc_feature 1..20: note = C9Orf72 CTCN PAM targeting sequence
  source 1..20: mol_type = other RNA
agtgaaagccttcctggatc

SEQ ID NO: 19740 - RNA, 20 nt, synthetic construct
  misc_feature 1..20: note = C9Orf72 CTCN PAM targeting sequence
  source 1..20: mol_type = other RNA
gtgtaagacatcttgaaaaa

SEQ ID NO: 19741 - RNA, 20 nt, synthetic construct
  misc_feature 1..20: note = C9Orf72 CTCN PAM targeting sequence
  source 1..20: mol_type = other RNA
cttgagccaacattttaagt

SEQ ID NO: 19742 - RNA, 20 nt, synthetic construct
  misc_feature 1..20: note = C9Orf72 CTCN PAM targeting sequence
  source 1..20: mol_type = other RNA
agtgagggattgtggaaggt

SEQ ID NO: 19743 - RNA, 20 nt, synthetic construct
  misc_feature 1..20: note = C9Orf72 CTCN PAM targeting sequence
  source 1..20: mol_type = other RNA
aaatatatatatctatattc

SEQ ID NO: 19744 - RNA, 20 nt, synthetic construct
  misc_feature 1..20: note = C9Orf72 CTCN PAM targeting sequence
  source 1..20: mol_type = other RNA
aggatatatttacattttac

SEQ ID NO: 19745 - RNA, 20 nt, synthetic construct
  misc_feature 1..20: note = C9Orf72 CTCN PAM targeting sequence
  source 1..20: mol_type = other RNA
aaagaatataagcagtcccc

SEQ ID NO: 19746 - RNA, 20 nt, synthetic construct
  misc_feature 1..20: note = C9Orf72 CTCN PAM targeting sequence
  source 1..20: mol_type = other RNA
catcttttaaaaaaagtaga

SEQ ID NO: 19747 - RNA, 20 nt, synthetic construct
  misc_feature 1..20: note = C9Orf72 CTCN PAM targeting sequence
  source 1..20: mol_type = other RNA
tcttttaaaaaaagtagaga

SEQ ID NO: 19748 - RNA, 20 nt, synthetic construct
  misc_feature 1..20: note = C9Orf72 CTCN PAM targeting sequence
  source 1..20: mol_type = other RNA
actttttttaaaagatgaga

SEQ ID NO: 19749 - RNA, 20 nt, synthetic construct
  misc_feature 1..20: note = C9Orf72 CTCN PAM targeting sequence
  source 1..20: mol_type = other RNA
aaaaaaaacaaaaaacaaac

SEQ ID NO: 19750 - RNA, 20 nt, synthetic construct
  misc_feature 1..20: note = C9Orf72 CTCN PAM targeting sequence
  source 1..20: mol_type = other RNA
aatttttcttcacatttttt

SEQ ID NO: 19751 - RNA, 20 nt, synthetic construct
  misc_feature 1..20: note = C9Orf72 CTCN PAM targeting sequence
  source 1..20: mol_type = other RNA
ctcaaatttttcttcacatt

SEQ ID NO: 19752 - RNA, 20 nt, synthetic construct
  misc_feature 1..20: note = C9Orf72 CTCN PAM targeting sequence
  source 1..20: mol_type = other RNA
aatctcactcaaatttttct

SEQ ID NO: 19753 - RNA, 20 nt, synthetic construct
  misc_feature 1..20: note = C9Orf72 CTCN PAM targeting sequence
  source 1..20: mol_type = other RNA
gatgattatccactgggttt

SEQ ID NO: 19754 - RNA, 20 nt, synthetic construct
  misc_feature 1..20: note = C9Orf72 CTCN PAM targeting sequence
  source 1..20: mol_type = other RNA
acaagcccaccatctgtaag

SEQ ID NO: 19755 - RNA, 20 nt, synthetic construct
  misc_feature 1..20: note = C9Orf72 CTCN PAM targeting sequence
  source 1..20: mol_type = other RNA
ggtcgttgccaaggtaggta

SEQ ID NO: 19756 - RNA, 20 nt, synthetic construct
  misc_feature 1..20: note = C9Orf72 CTCN PAM targeting sequence
  source 1..20: mol_type = other RNA
ctctggtcgttgccaaggta

SEQ ID NO: 19757 - RNA, 20 nt, synthetic construct
  misc_feature 1..20: note = C9Orf72 CTCN PAM targeting sequence
  source 1..20: mol_type = other RNA
ctttcatctttttctcttcc

SEQ ID NO: 19758 - RNA, 20 nt, synthetic construct
  misc_feature 1..20: note = C9Orf72 CTCN PAM targeting sequence
  source 1..20: mol_type = other RNA
tccattttccctaggttcta

SEQ ID NO: 19759 - RNA, 20 nt, synthetic construct
  misc_feature 1..20: note = C9Orf72 CTCN PAM targeting sequence
  source 1..20: mol_type = other RNA
ggccagagggtaagagaaca

SEQ ID NO: 19760 - RNA, 20 nt, synthetic construct
  misc_feature 1..20: note = C9Orf72 CTCN PAM targeting sequence
  source 1..20: mol_type = other RNA
ggcctgagtagaacctaggg

SEQ ID NO: 19761 - RNA, 20 nt, synthetic construct
  misc_feature 1..20: note = C9Orf72 CTCN PAM targeting sequence
  source 1..20: mol_type = other RNA
taccctctggcctgagtaga

SEQ ID NO: 19762 - RNA, 20 nt, synthetic construct
  misc_feature 1..20: note = C9Orf72 CTCN PAM targeting sequence
  source 1..20: mol_type = other RNA
tactaaatgttctcttaccc

SEQ ID NO: 19763 - RNA, 20 nt, synthetic construct
  misc_feature 1..20: note = C9Orf72 CTCN PAM targeting sequence
  source 1..20: mol_type = other RNA
tcttactaaatgttctctta

SEQ ID NO: 19764 - RNA, 20 nt, synthetic construct
  misc_feature 1..20: note = C9Orf72 CTCN PAM targeting sequence
  source 1..20: mol_type = other RNA
tcctcttactaaatgttctc

SEQ ID NO: 19765 - RNA, 20 nt, synthetic construct
  misc_feature 1..20: note = C9Orf72 CTCN PAM targeting sequence
  source 1..20: mol_type = other RNA
ggtcaggtataggatgatcc

SEQ ID NO: 19766 - RNA, 20 nt, synthetic construct
  misc_feature 1..20: note = C9Orf72 CTCN PAM targeting sequence
  source 1..20: mol_type = other RNA
ttttttgccactctggtcag

SEQ ID NO: 19767 - RNA, 20 nt, synthetic construct
  misc_feature 1..20: note = C9Orf72 CTCN PAM targeting sequence
  source 1..20: mol_type = other RNA
tttcttaagataaggaaact

SEQ ID NO: 19768 - RNA, 20 nt, synthetic construct
  misc_feature 1..20: note = C9Orf72 CTCN PAM targeting sequence
  source 1..20: mol_type = other RNA
ggaaagagaataaggcttat

SEQ ID NO: 19769 - RNA, 20 nt, synthetic construct
  misc_feature 1..20: note = C9Orf72 CTCN PAM targeting sequence
  source 1..20: mol_type = other RNA
ttccagagcccaagaagggg

SEQ ID NO: 19770 - RNA, 20 nt, synthetic construct
  misc_feature 1..20: note = C9Orf72 CTCN PAM targeting sequence
  source 1..20: mol_type = other RNA
attaaatataagccttattc

SEQ ID NO: 19771 - RNA, 20 nt, synthetic construct
  misc_feature 1..20: note = C9Orf72 CTCN PAM targeting sequence
  source 1..20: mol_type = other RNA
ttcagtggaacaggtataat

SEQ ID NO: 19772 - RNA, 20 nt, synthetic construct
  misc_feature 1..20: note = C9Orf72 CTCN PAM targeting sequence
  source 1..20: mol_type = other RNA
gatttctttcagcagtgttt

SEQ ID NO: 19773 - RNA, 20 nt, synthetic construct
  misc_feature 1..20: note = C9Orf72 CTCN PAM targeting sequence
  source 1..20: mol_type = other RNA
tagagatctttcacctccct

SEQ ID NO: 19774 - RNA, 20 nt, synthetic construct
  misc_feature 1..20: note = C9Orf72 CTCN PAM targeting sequence
  source 1..20: mol_type = other RNA
atgagaattacaaaacactg

SEQ ID NO: 19775 - RNA, 20 nt, synthetic construct
  misc_feature 1..20: note = C9Orf72 CTCN PAM targeting sequence
  source 1..20: mol_type = other RNA
ctggttagctggattcctag

SEQ ID NO: 19776 - RNA, 20 nt, synthetic construct
  misc_feature 1..20: note = C9Orf72 CTCN PAM targeting sequence
  source 1..20: mol_type = other RNA
cactttggaaggtgttggag

SEQ ID NO: 19777 - RNA, 20 nt, synthetic construct
  misc_feature 1..20: note = C9Orf72 CTCN PAM targeting sequence
  source 1..20: mol_type = other RNA
ctttggaaggtgttggagta

SEQ ID NO: 19778 - RNA, 20 nt, synthetic construct
  misc_feature 1..20: note = C9Orf72 CTCN PAM targeting sequence
  source 1..20: mol_type = other RNA
aacaccttccaaagtgagag

SEQ ID NO: 19779 - RNA, 20 nt, synthetic construct
  misc_feature 1..20: note = C9Orf72 CTCN PAM targeting sequence
  source 1..20: mol_type = other RNA
atactccaacaccttccaaa

SEQ ID NO: 19780 - RNA, 20 nt, synthetic construct
  misc_feature 1..20: note = C9Orf72 CTCN PAM targeting sequence
  source 1..20: mol_type = other RNA
taaatctgttaaaaatttca

SEQ ID NO: 19781 - RNA, 20 nt, synthetic construct
  misc_feature 1..20: note = C9Orf72 CTCN PAM targeting sequence
  source 1..20: mol_type = other RNA
gcccagaaactcctaaatct

SEQ ID NO: 19782 - RNA, 20 nt, synthetic construct
  misc_feature 1..20: note = C9Orf72 CTCN PAM targeting sequence
  source 1..20: mol_type = other RNA
tagtctctgcccagaaactc

SEQ ID NO: 19783 - RNA, 20 nt, synthetic construct
  misc_feature 1..20: note = C9Orf72 CTCN PAM targeting sequence
  source 1..20: mol_type = other RNA
tcctatctgaatgtctttct

SEQ ID NO: 19784 - RNA, 20 nt, synthetic construct
  misc_feature 1..20: note = C9Orf72 CTCN PAM targeting sequence
  source 1..20: mol_type = other RNA
ttcctgattgctctggctag

SEQ ID NO: 19785 - RNA, 20 nt, synthetic construct
  misc_feature 1..20: note = C9Orf72 CTCN PAM targeting sequence
  source 1..20: mol_type = other RNA
ggctaggacttccagaacta

SEQ ID NO: 19786 - RNA, 20 nt, synthetic construct
  misc_feature 1..20: note = C9Orf72 CTCN PAM targeting sequence
  source 1..20: mol_type = other RNA
ttttcagcatagttctggaa

SEQ ID NO: 19787 - RNA, 20 nt, synthetic construct
  misc_feature 1..20: note = C9Orf72 CTCN PAM targeting sequence
  source 1..20: mol_type = other RNA
ccactccttttcagcatagt

SEQ ID NO: 19788 - RNA, 20 nt, synthetic construct
  misc_feature 1..20: note = C9Orf72 CTCN PAM targeting sequence
  source 1..20: mol_type = other RNA
caccactccttttcagcata

SEQ ID NO: 19789 - RNA, 20 nt, synthetic construct
  misc_feature 1..20: note = C9Orf72 CTCN PAM targeting sequence
  source 1..20: mol_type = other RNA
aggagaatacttccagcttt

SEQ ID NO: 19790 - RNA, 20 nt, synthetic construct
  misc_feature 1..20: note = C9Orf72 CTCN PAM targeting sequence
  source 1..20: mol_type = other RNA
ttgagaaccgtaacaagaca

SEQ ID NO: 19791 - RNA, 20 nt, synthetic construct
  misc_feature 1..20: note = C9Orf72 CTCN PAM targeting sequence
  source 1..20: mol_type = other RNA
aaaaaataagaaccatctat

SEQ ID NO: 19792 - RNA, 20 nt, synthetic construct
  misc_feature 1..20: note = C9Orf72 CTCN PAM targeting sequence
  source 1..20: mol_type = other RNA
aaaaagaaaaatcacaaaca

SEQ ID NO: 19793 - RNA, 20 nt, synthetic construct
  misc_feature 1..20: note = C9Orf72 CTCN PAM targeting sequence
  source 1..20: mol_type = other RNA
ctccgttgcccaggctggag

SEQ ID NO: 19794 - RNA, 20 nt, synthetic construct
  misc_feature 1..20: note = C9Orf72 CTCN PAM targeting sequence
  source 1..20: mol_type = other RNA
gttgcccaggctggagtgcg

SEQ ID NO: 19795 - RNA, 20 nt, synthetic construct
  misc_feature 1..20: note = C9Orf72 CTCN PAM targeting sequence
  source 1..20: mol_type = other RNA
agcctgggcaacggagtgag

SEQ ID NO: 19796 - RNA, 20 nt, synthetic construct
  misc_feature 1..20: note = C9Orf72 CTCN PAM targeting sequence
  source 1..20: mol_type = other RNA
gctcgctgccaacctctgcc

SEQ ID NO: 19797 - RNA, 20 nt, synthetic construct
  misc_feature 1..20: note = C9Orf72 CTCN PAM targeting sequence
  source 1..20: mol_type = other RNA
ctgccaacctctgcctcccg

SEQ ID NO: 19798 - RNA, 20 nt, synthetic construct
  misc_feature 1..20: note = C9Orf72 CTCN PAM targeting sequence
  source 1..20: mol_type = other RNA
gcctcccgggctcaaacaat

SEQ ID NO: 19799 - RNA, 20 nt, synthetic construct
  misc_feature 1..20: note = C9Orf72 CTCN PAM targeting sequence
  source 1..20: mol_type = other RNA
cgggctcaaacaatcctccc

SEQ ID NO: 19800 - RNA, 20 nt, synthetic construct
  misc_feature 1..20: note = C9Orf72 CTCN PAM targeting sequence
  source 1..20: mol_type = other RNA
aacaatcctcccacctcaac

SEQ ID NO: 19801 - RNA, 20 nt, synthetic construct
  misc_feature 1..20: note = C9Orf72 CTCN PAM targeting sequence
  source 1..20: mol_type = other RNA
cacctcaacctcctgaatag

SEQ ID NO: 19802 - RNA, 20 nt, synthetic construct
  misc_feature 1..20: note = C9Orf72 CTCN PAM targeting sequence
  source 1..20: mol_type = other RNA
acctcctgaatagctgggac

SEQ ID NO: 19803 - RNA, 20 nt, synthetic construct
  misc_feature 1..20: note = C9Orf72 CTCN PAM targeting sequence
  source 1..20: mol_type = other RNA
tgaatagctgggactatagg

SEQ ID NO: 19804 - RNA, 20 nt, synthetic construct
  misc_feature 1..20: note = C9Orf72 CTCN PAM targeting sequence
  source 1..20: mol_type = other RNA
acaaaaaaaaaaaaaaaaaa

SEQ ID NO: 19805 - RNA, 20 nt, synthetic construct
  misc_feature 1..20: note = C9Orf72 CTCN PAM targeting sequence
  source 1..20: mol_type = other RNA
tcttgaactcctgggcttaa

SEQ ID NO: 19806 - RNA, 20 nt, synthetic construct
  misc_feature 1..20: note = C9Orf72 CTCN PAM targeting sequence
  source 1..20: mol_type = other RNA
tgggcttaagagatatgccc

SEQ ID NO: 19807 - RNA, 20 nt, synthetic construct
  misc_feature 1..20: note = C9Orf72 CTCN PAM targeting sequence
  source 1..20: mol_type = other RNA
taagcccaggagttcaagac

SEQ ID NO: 19808 - RNA, 20 nt, synthetic construct
  misc_feature 1..20: note = C9Orf72 CTCN PAM targeting sequence
  source 1..20: mol_type = other RNA
caaagtgctgggattacagg

SEQ ID NO: 19809 - RNA, 20 nt, synthetic construct
  misc_feature 1..20: note = C9Orf72 CTCN PAM targeting sequence
  source 1..20: mol_type = other RNA
cacctgtaatcccagcactt

SEQ ID NO: 19810 - RNA, 20 nt, synthetic construct
  misc_feature 1..20: note = C9Orf72 CTCN PAM targeting sequence
  source 1..20: mol_type = other RNA
atgttaaaaaccttcagtag

SEQ ID NO: 19811 - RNA, 20 nt, synthetic construct
  misc_feature 1..20: note = C9Orf72 CTCN PAM targeting sequence
  source 1..20: mol_type = other RNA
acctattgagataatcttgt

SEQ ID NO: 19812 - RNA, 20 nt, synthetic construct
  misc_feature 1..20: note = C9Orf72 CTCN PAM targeting sequence
  source 1..20: mol_type = other RNA
ataggtagagaaaaggttgt

SEQ ID NO: 19813 - RNA, 20 nt, synthetic construct
  misc_feature 1..20: note = C9Orf72 CTCN PAM targeting sequence
  source 1..20: mol_type = other RNA
gtttatgtgatgaatcacac

SEQ ID NO: 19814 - RNA, 20 nt, synthetic construct
  misc_feature 1..20: note = C9Orf72 CTCN PAM targeting sequence
  source 1..20: mol_type = other RNA
acaaaatactagcaaaccaa

SEQ ID NO: 19815 - RNA, 20 nt, synthetic construct
  misc_feature 1..20: note = C9Orf72 CTCN PAM targeting sequence
  source 1..20: mol_type = other RNA
gccaggttttggtatcagaa

SEQ ID NO: 19816 - RNA, 20 nt, synthetic construct
  misc_feature 1..20: note = C9Orf72 CTCN PAM targeting sequence
  source 1..20: mol_type = other RNA
ttagggaagagttcctcctc

SEQ ID NO: 19817 - RNA, 20 nt, synthetic construct
  misc_feature 1..20: note = C9Orf72 CTCN PAM targeting sequence
  source 1..20: mol_type = other RNA
tccctaatgaggccagcatc

SEQ ID NO: 19818 - RNA, 20 nt, synthetic construct
  misc_feature 1..20: note = C9Orf72 CTCN PAM targeting sequence
  source 1..20: mol_type = other RNA
tcctcaattttttggaacag

SEQ ID NO: 19819 - RNA, 20 nt, synthetic construct
  misc_feature 1..20: note = C9Orf72 CTCN PAM targeting sequence
  source 1..20: mol_type = other RNA
tcaattttttggaacagatt

SEQ ID NO: 19820 - RNA, 20 nt, synthetic construct
  misc_feature 1..20: note = C9Orf72 CTCN PAM targeting sequence
  source 1..20: mol_type = other RNA
attttttggaacagattgag

SEQ ID NO: 19821 - RNA, 20 nt, synthetic construct
  misc_feature 1..20: note = C9Orf72 CTCN PAM targeting sequence
  source 1..20: mol_type = other RNA
atctgttccaaaaaattgag

SEQ ID NO: 19822 - RNA, 20 nt, synthetic construct
  misc_feature 1..20: note = C9Orf72 CTCN PAM targeting sequence
  source 1..20: mol_type = other RNA
ttatacctgatgtataaaga

SEQ ID NO: 19823 - RNA, 20 nt, synthetic construct
  misc_feature 1..20: note = C9Orf72 CTCN PAM targeting sequence
  source 1..20: mol_type = other RNA
tttttgggtccatattaatt

SEQ ID NO: 19824 - RNA, 20 nt, synthetic construct
  misc_feature 1..20: note = C9Orf72 CTCN PAM targeting sequence
  source 1..20: mol_type = other RNA
agctttgttctttttgctta

SEQ ID NO: 19825 - RNA, 20 nt, synthetic construct
  misc_feature 1..20: note = C9Orf72 CTCN PAM targeting sequence
  source 1..20: mol_type = other RNA
attggtctatgtgtctgttt

SEQ ID NO: 19826 - RNA, 20 nt, synthetic construct
  misc_feature 1..20: note = C9Orf72 CTCN PAM targeting sequence
  source 1..20: mol_type = other RNA
attctccattggtctatgtg

SEQ ID NO: 19827 - RNA, 20 nt, synthetic construct
  misc_feature 1..20: note = C9Orf72 CTCN PAM targeting sequence
  source 1..20: mol_type = other RNA
ctattctccattggtctatg

SEQ ID NO: 19828 - RNA, 20 nt, synthetic construct
  misc_feature 1..20: note = C9Orf72 CTCN PAM targeting sequence
  source 1..20: mol_type = other RNA
gtattcaataaatggtgctg

SEQ ID NO: 19829 - RNA, 20 nt, synthetic construct
  misc_feature 1..20: note = C9Orf72 CTCN PAM targeting sequence
  source 1..20: mol_type = other RNA
aattcctatggctagcaatt

SEQ ID NO: 19830 - RNA, 20 nt, synthetic construct
  misc_feature 1..20: note = C9Orf72 CTCN PAM targeting sequence
  source 1..20: mol_type = other RNA
agatggattaaagacataaa

SEQ ID NO: 19831 - RNA, 20 nt, synthetic construct
  misc_feature 1..20: note = C9Orf72 CTCN PAM targeting sequence
  source 1..20: mol_type = other RNA
ttaggtcccatttgtgtttg

SEQ ID NO: 19832 - RNA, 20 nt, synthetic construct
  misc_feature 1..20: note = C9Orf72 CTCN PAM targeting sequence
  source 1..20: mol_type = other RNA
tgcatggcaaaagaaactat

SEQ ID NO: 19833 - RNA, 20 nt, synthetic construct
  misc_feature 1..20: note = C9Orf72 CTCN PAM targeting sequence
  source 1..20: mol_type = other RNA
gttgatagtttcttttgcca

SEQ ID NO: 19834 - RNA, 20 nt, synthetic construct
  misc_feature 1..20: note = C9Orf72 CTCN PAM targeting sequence
  source 1..20: mol_type = other RNA
cattgtgtaggttgtctttt

SEQ ID NO: 19835 - RNA, 20 nt, synthetic construct
  misc_feature 1..20: note = C9Orf72 CTCN PAM targeting sequence
  source 1..20: mol_type = other RNA
attagtgatattaagcattt

SEQ ID NO: 19836 - RNA, 20 nt, synthetic construct
  misc_feature 1..20: note = C9Orf72 CTCN PAM targeting sequence
  source 1..20: mol_type = other RNA
aggaatggctattattaaaa

SEQ ID NO: 19837 - RNA, 20 nt, synthetic construct
  misc_feature 1..20: note = C9Orf72 CTCN PAM targeting sequence
  source 1..20: mol_type = other RNA
acaaccttgccaacatctgt

SEQ ID NO: 19838 - RNA, 20 nt, synthetic construct
  misc_feature 1..20: note = C9Orf72 CTCN PAM targeting sequence
  source 1..20: mol_type = other RNA
aataactgaaaatagaacta

SEQ ID NO: 19839 - RNA, 20 nt, synthetic construct
  misc_feature 1..20: note = C9Orf72 CTCN PAM targeting sequence
  source 1..20: mol_type = other RNA
atctggtttttatggctgca

SEQ ID NO: 19840 - RNA, 20 nt, synthetic construct
  misc_feature 1..20: note = C9Orf72 CTCN PAM targeting sequence
  source 1..20: mol_type = other RNA
agctccatctggtttttatg

SEQ ID NO: 19841 - RNA, 20 nt, synthetic construct
  misc_feature 1..20: note = C9Orf72 CTCN PAM targeting sequence
  source 1..20: mol_type = other RNA
cttctaagtgggagctaaac

SEQ ID NO: 19842 - RNA, 20 nt, synthetic construct
  misc_feature 1..20: note = C9Orf72 CTCN PAM targeting sequence
  source 1..20: mol_type = other RNA
cacttagaagtgagaacatg

SEQ ID NO: 19843 - RNA, 20 nt, synthetic construct
  misc_feature 1..20: note = C9Orf72 CTCN PAM targeting sequence
  source 1..20: mol_type = other RNA
gtgtttagctcccacttaga

SEQ ID NO: 19844 - RNA, 20 nt, synthetic construct
  misc_feature 1..20: note = C9Orf72 CTCN PAM targeting sequence
  source 1..20: mol_type = other RNA
agtaggccctggtgttgctg

SEQ ID NO: 19845 - RNA, 20 nt, synthetic construct
  misc_feature 1..20: note = C9Orf72 CTCN PAM targeting sequence
  source 1..20: mol_type = other RNA
caccctcaagtaggccctgg

SEQ ID NO: 19846 - RNA, 20 nt, synthetic construct
  misc_feature 1..20: note = C9Orf72 CTCN PAM targeting sequence
  source 1..20: mol_type = other RNA
cccttctcccaccctcaagt

SEQ ID NO: 19847 - RNA, 20 nt, synthetic construct
  misc_feature 1..20: note = C9Orf72 CTCN PAM targeting sequence
  source 1..20: mol_type = other RNA
tgacacgcaatttacctgta

SEQ ID NO: 19848 - RNA, 20 nt, synthetic construct
  misc_feature 1..20: note = C9Orf72 CTCN PAM targeting sequence
  source 1..20: mol_type = other RNA
gtgacaatagacttaacaca

SEQ ID NO: 19849 - RNA, 20 nt, synthetic construct
  misc_feature 1..20: note = C9Orf72 CTCN PAM targeting sequence
  source 1..20: mol_type = other RNA
aaattttctaaacataaaat

SEQ ID NO: 19850 - RNA, 20 nt, synthetic construct
  misc_feature 1..20: note = C9Orf72 CTCN PAM targeting sequence
  source 1..20: mol_type = other RNA
ttttgctgatcatgacaaaa

SEQ ID NO: 19851 - RNA, 20 nt, synthetic construct
  misc_feature 1..20: note = C9Orf72 CTCN PAM targeting sequence
  source 1..20: mol_type = other RNA
aaaaaacaaaacaaaaatac

SEQ ID NO: 19852 - RNA, 20 nt, synthetic construct
  misc_feature 1..20: note = C9Orf72 CTCN PAM targeting sequence
  source 1..20: mol_type = other RNA
aaaaagctcccaagtaacca

SEQ ID NO: 19853 - RNA, 20 nt, synthetic construct
  misc_feature 1..20: note = C9Orf72 CTCN PAM targeting sequence
  source 1..20: mol_type = other RNA
caagtaaccaatcaaaaaac

SEQ ID NO: 19854 - RNA, 20 nt, synthetic construct
  misc_feature 1..20: note = C9Orf72 CTCN PAM targeting sequence
  source 1..20: mol_type = other RNA
agaaccaataaaaactctgg

SEQ ID NO: 19855 - RNA, 20 nt, synthetic construct
  misc_feature 1..20: note = C9Orf72 CTCN PAM targeting sequence
  source 1..20: mol_type = other RNA
ggagaactaggaaaaaatgg

SEQ ID NO: 19856 - RNA, 20 nt, synthetic construct
  misc_feature 1..20: note = C9Orf72 CTCN PAM targeting sequence
  source 1..20: mol_type = other RNA
agagtttttattggttcttg

SEQ ID NO: 19857 - RNA, 20 nt, synthetic construct
  misc_feature 1..20: note = C9Orf72 CTCN PAM targeting sequence
  source 1..20: mol_type = other RNA
aggtgcagaaagatgactta

SEQ ID NO: 19858 - RNA, 20 nt, synthetic construct
  misc_feature 1..20: note = C9Orf72 CTCN PAM targeting sequence
  source 1..20: mol_type = other RNA
acaggtctgttacctaagct

SEQ ID NO: 19859 - RNA, 20 nt, synthetic construct
  misc_feature 1..20: note = C9Orf72 CTCN PAM targeting sequence
  source 1..20: mol_type = other RNA
aactgattctgtagatacat

SEQ ID NO: 19860 - RNA, 20 nt, synthetic construct
  misc_feature 1..20: note = C9Orf72 CTCN PAM targeting sequence
  source 1..20: mol_type = other RNA
gtcttatttaaaaaaaaaaa

SEQ ID NO: 19861 - RNA, 20 nt, synthetic construct
  misc_feature 1..20: note = C9Orf72 CTCN PAM targeting sequence
  source 1..20: mol_type = other RNA
gtgttccccaggctggagta

SEQ ID NO: 19862 - RNA, 20 nt, synthetic construct
  misc_feature 1..20: note = C9Orf72 CTCN PAM targeting sequence
  source 1..20: mol_type = other RNA
agcctggggaacaccgagac

SEQ ID NO: 19863 - RNA, 20 nt, synthetic construct
  misc_feature 1..20: note = C9Orf72 CTCN PAM targeting sequence
  source 1..20: mol_type = other RNA
ctgtaacctcaaactcctgg

SEQ ID NO: 19864 - RNA, 20 nt, synthetic construct
  misc_feature 1..20: note = C9Orf72 CTCN PAM targeting sequence
  source 1..20: mol_type = other RNA
aactcctgggctcaaaagat

SEQ ID NO: 19865 - RNA, 20 nt, synthetic construct
  misc_feature 1..20: note = C9Orf72 CTCN PAM targeting sequence
  source 1..20: mol_type = other RNA
tgggctcaaaagatcctcct

SEQ ID NO: 19866 - RNA, 20 nt, synthetic construct
  misc_feature 1..20: note = C9Orf72 CTCN PAM targeting sequence
  source 1..20: mol_type = other RNA
aaagatcctcctgcctcagc

SEQ ID NO: 19867 - RNA, 20 nt, synthetic construct
  misc_feature 1..20: note = C9Orf72 CTCN PAM targeting sequence
  source 1..20: mol_type = other RNA
tgcctcagctttcggaatag

SEQ ID NO: 19868 - RNA, 20 nt, synthetic construct
  misc_feature 1..20: note = C9Orf72 CTCN PAM targeting sequence
  source 1..20: mol_type = other RNA
gctttcggaatagctaggat

SEQ ID NO: 19869 - RNA, 20 nt, synthetic construct
  misc_feature 1..20: note = C9Orf72 CTCN PAM targeting sequence
  source 1..20: mol_type = other RNA
acaaaaaataaaaaagaatt

SEQ ID NO: 19870 - RNA, 20 nt, synthetic construct
  misc_feature 1..20: note = C9Orf72 CTCN PAM targeting sequence
  source 1..20: mol_type = other RNA
tggcctcaagtgatccgcct

SEQ ID NO: 19871 - RNA, 20 nt, synthetic construct
  misc_feature 1..20: note = C9Orf72 CTCN PAM targeting sequence
  source 1..20: mol_type = other RNA
agtgatccgcctgccttgca

SEQ ID NO: 19872 - RNA, 20 nt, synthetic construct
  misc_feature 1..20: note = C9Orf72 CTCN PAM targeting sequence
  source 1..20: mol_type = other RNA
caaagctctgttcttacagg

SEQ ID NO: 19873 - RNA, 20 nt, synthetic construct
  misc_feature 1..20: note = C9Orf72 CTCN PAM targeting sequence
  source 1..20: mol_type = other RNA
gttcttacaggcatgagcta

SEQ ID NO: 19874 - RNA, 20 nt, synthetic construct
  misc_feature 1..20: note = C9Orf72 CTCN PAM targeting sequence
  source 1..20: mol_type = other RNA
tgcctgtaagaacagagctt

SEQ ID NO: 19875 - RNA, 20 nt, synthetic construct
  misc_feature 1..20: note = C9Orf72 CTCN PAM targeting sequence
  source 1..20: mol_type = other RNA
tttatcagttgaaaaaaggc

SEQ ID NO: 19876 - RNA, 20 nt, synthetic construct
  misc_feature 1..20: note = C9Orf72 CTCN PAM targeting sequence
  source 1..20: mol_type = other RNA
acaattaattatcattactt

SEQ ID NO: 19877 - RNA, 20 nt, synthetic construct
  misc_feature 1..20: note = C9Orf72 CTCN PAM targeting sequence
  source 1..20: mol_type = other RNA
taggcactgttctaggtacc

SEQ ID NO: 19878 - RNA, 20 nt, synthetic construct
  misc_feature 1..20: note = C9Orf72 CTCN PAM targeting sequence
  source 1..20: mol_type = other RNA
atatatatttattaaacaaa

SEQ ID NO: 19879 - RNA, 20 nt, synthetic construct
  misc_feature 1..20: note = C9Orf72 CTCN PAM targeting sequence
  source 1..20: mol_type = other RNA
gcctgctggtactgtagtca

SEQ ID NO: 19880 - RNA, 20 nt, synthetic construct
  misc_feature 1..20: note = C9Orf72 CTCN PAM targeting sequence
  source 1..20: mol_type = other RNA
tgatttgtacgtaatgctct

SEQ ID NO: 19881 - RNA, 20 nt, synthetic construct
  misc_feature 1..20: note = C9Orf72 CTCN PAM targeting sequence
  source 1..20: mol_type = other RNA
ggatacgatcatctacactg

SEQ ID NO: 19882 - RNA, 20 nt, synthetic construct
  misc_feature 1..20: note = C9Orf72 CTCN PAM targeting sequence
  source 1..20: mol_type = other RNA
ccagaaggctgtcagctcgg

SEQ ID NO: 19883 - RNA, 20 nt, synthetic construct
  misc_feature 1..20: note = C9Orf72 CTCN PAM targeting sequence
  source 1..20: mol_type = other RNA
agaaggctgtcagctcggat

SEQ ID NO: 19884 - RNA, 20 nt, synthetic construct
  misc_feature 1..20: note = C9Orf72 CTCN PAM targeting sequence
  source 1..20: mol_type = other RNA
gatctcatgtatctacgctg

SEQ ID NO: 19885 - RNA, 20 nt, synthetic construct
  misc_feature 1..20: note = C9Orf72 CTCN PAM targeting sequence
  source 1..20: mol_type = other RNA
tgtatctacgctgattataa

SEQ ID NO: 19886 - RNA, 20 nt, synthetic construct
  misc_feature 1..20: note = C9Orf72 CTCN PAM targeting sequence
  source 1..20: mol_type = other RNA
atatcccaccacacacatag

SEQ ID NO: 19887 - RNA, 20 nt, synthetic construct
  misc_feature 1..20: note = C9Orf72 CTCN PAM targeting sequence
  source 1..20: mol_type = other RNA
gatttagcaaatccatctct

SEQ ID NO: 19888 - RNA, 20 nt, synthetic construct
  misc_feature 1..20: note = C9Orf72 CTCN PAM targeting sequence
  source 1..20: mol_type = other RNA
aaaaatttatcctaagaagc

SEQ ID NO: 19889 - RNA, 20 nt, synthetic construct
  misc_feature 1..20: note = C9Orf72 CTCN PAM targeting sequence
  source 1..20: mol_type = other RNA
tgaatagcttcttaggataa

SEQ ID NO: 19890 - RNA, 20 nt, synthetic construct
  misc_feature 1..20: note = C9Orf72 CTCN PAM targeting sequence
  source 1..20: mol_type = other RNA
ttgaatatcaacacaaactt

SEQ ID NO: 19891 - RNA, 20 nt, synthetic construct
  misc_feature 1..20: note = C9Orf72 CTCN PAM targeting sequence
  source 1..20: mol_type = other RNA
gcatgttctaatctgctttt

SEQ ID NO: 19892 - RNA, 20 nt, synthetic construct
  misc_feature 1..20: note = C9Orf72 CTCN PAM targeting sequence
  source 1..20: mol_type = other RNA
cacccccactggatcatctc

SEQ ID NO: 19893 - RNA, 20 nt, synthetic construct
  misc_feature 1..20: note = C9Orf72 CTCN PAM targeting sequence
  source 1..20: mol_type = other RNA
ttctagtctttttttccctt

SEQ ID NO: 19894 - RNA, 20 nt, synthetic construct
  misc_feature 1..20: note = C9Orf72 CTCN PAM targeting sequence
  source 1..20: mol_type = other RNA
atgagtatgtatttttataa

SEQ ID NO: 19895 - RNA, 20 nt, synthetic construct
  misc_feature 1..20: note = C9Orf72 CTCN PAM targeting sequence
  source 1..20: mol_type = other RNA
ttgaggtgcatagaataatt

SEQ ID NO: 19896 - RNA, 20 nt, synthetic construct
  misc_feature 1..20: note = C9Orf72 CTCN PAM targeting sequence
  source 1..20: mol_type = other RNA
tacgcagtaggttattatta

SEQ ID NO: 19897 - RNA, 20 nt, synthetic construct
  misc_feature 1..20: note = C9Orf72 CTCN PAM targeting sequence
  source 1..20: mol_type = other RNA
ttcttctgttctgttcatag

SEQ ID NO: 19898 - RNA, 20 nt, synthetic construct
  misc_feature 1..20: note = C9Orf72 CTCN PAM targeting sequence
  source 1..20: mol_type = other RNA
atgcaaatacaaatcatata

SEQ ID NO: 19899 - RNA, 20 nt, synthetic construct
  misc_feature 1..20: note = C9Orf72 CTCN PAM targeting sequence
  source 1..20: mol_type = other RNA
aggcatctggtataggtccc

SEQ ID NO: 19900 - RNA, 20 nt, synthetic construct
  misc_feature 1..20: note = C9Orf72 CTCN PAM targeting sequence
  source 1..20: mol_type = other RNA
tttaattatataattttagt

SEQ ID NO: 19901 - RNA, 20 nt, synthetic construct
  misc_feature 1..20: note = C9Orf72 CTCN PAM targeting sequence
  source 1..20: mol_type = other RNA
catttaattatataatttta

SEQ ID NO: 19902 - RNA, 20 nt, synthetic construct
  misc_feature 1..20: note = C9Orf72 CTCN PAM targeting sequence
  source 1..20: mol_type = other RNA
gcaccctctcatttaattat

SEQ ID NO: 19903 - RNA, 20 nt, synthetic construct
  misc_feature 1..20: note = C9Orf72 CTCN PAM targeting sequence
  source 1..20: mol_type = other RNA
tgttaaaggcataataaagt

SEQ ID NO: 19904 - RNA, 20 nt, synthetic construct
  misc_feature 1..20: note = C9Orf72 CTCN PAM targeting sequence
  source 1..20: mol_type = other RNA
aatagaaactacgtttcctt

SEQ ID NO: 19905 - RNA, 20 nt, synthetic construct
  misc_feature 1..20: note = C9Orf72 CTCN PAM targeting sequence
  source 1..20: mol_type = other RNA
gaatgatagtatttaaatat

SEQ ID NO: 19906 - RNA, 20 nt, synthetic construct
  misc_feature 1..20: note = C9Orf72 CTCN PAM targeting sequence
  source 1..20: mol_type = other RNA
agaaagtagtcactatgaga

SEQ ID NO: 19907 - RNA, 20 nt, synthetic construct
  misc_feature 1..20: note = C9Orf72 CTCN PAM targeting sequence
  source 1..20: mol_type = other RNA
tagtgactactttcttgagg

SEQ ID NO: 19908 - RNA, 20 nt, synthetic construct
  misc_feature 1..20: note = C9Orf72 CTCN PAM targeting sequence
  source 1..20: mol_type = other RNA
gttttgctccttgacagtag

SEQ ID NO: 19909 - RNA, 20 nt, synthetic construct
  misc_feature 1..20: note = C9Orf72 CTCN PAM targeting sequence
  source 1..20: mol_type = other RNA
ttgacagtagactcaaataa

SEQ ID NO: 19910 - RNA, 20 nt, synthetic construct
  misc_feature 1..20: note = C9Orf72 CTCN PAM targeting sequence
  source 1..20: mol_type = other RNA
aataaaagaaaaatacaatt

SEQ ID NO: 19911 - RNA, 20 nt, synthetic construct
  misc_feature 1..20: note = C9Orf72 CTCN PAM targeting sequence
  source 1..20: mol_type = other RNA
ggacttttttttttttaaca

SEQ ID NO: 19912 - RNA, 20 nt, synthetic construct
  misc_feature 1..20: note = C9Orf72 CTCN PAM targeting sequence
  source 1..20: mol_type = other RNA
gggcatgtcaatatgagata

SEQ ID NO: 19913 - RNA, 20 nt, synthetic construct
  misc_feature 1..20: note = C9Orf72 CTCN PAM targeting sequence
  source 1..20: mol_type = other RNA
tattgacatgcccagagact

SEQ ID NO: 19914 - RNA, 20 nt, synthetic construct
  misc_feature 1..20: note = C9Orf72 CTCN PAM targeting sequence
  source 1..20: mol_type = other RNA
ttatagacaaatcttaaata

SEQ ID NO: 19915 - RNA, 20 nt, synthetic construct
  misc_feature 1..20: note = C9Orf72 CTCN PAM targeting sequence
  source 1..20: mol_type = other RNA
aaaatgattttagaaaagtg

SEQ ID NO: 19916 - RNA, 20 nt, synthetic construct
  misc_feature 1..20: note = C9Orf72 CTCN PAM targeting sequence
  source 1..20: mol_type = other RNA
ttgtacaaggcctgctaaag

SEQ ID NO: 19917 - RNA, 20 nt, synthetic construct
  misc_feature 1..20: note = C9Orf72 CTCN PAM targeting sequence
  source 1..20: mol_type = other RNA
tatttaaatgatgattctgc

SEQ ID NO: 19918 - RNA, 20 nt, synthetic construct
  misc_feature 1..20: note = C9Orf72 CTCN PAM targeting sequence
  source 1..20: mol_type = other RNA
aggttatgtgaagcagaatc

SEQ ID NO: 19919 - RNA, 20 nt, synthetic construct
  misc_feature 1..20: note = C9Orf72 CTCN PAM targeting sequence
  source 1..20: mol_type = other RNA
ctgctggagtcagaaaaagg

SEQ ID NO: 19920 - RNA, 20 nt, synthetic construct
  misc_feature 1..20: note = C9Orf72 CTCN PAM targeting sequence
  source 1..20: mol_type = other RNA
gctggagtcagaaaaaggca

SEQ ID NO: 19921 - RNA, 20 nt, synthetic construct
  misc_feature 1..20: note = C9Orf72 CTCN PAM targeting sequence
  source 1..20: mol_type = other RNA
agcagagagaaaatgctcca

SEQ ID NO: 19922 - RNA, 20 nt, synthetic construct
  misc_feature 1..20: note = C9Orf72 CTCN PAM targeting sequence
  source 1..20: mol_type = other RNA
aaacctttaacatttggcta

SEQ ID NO: 19923 - RNA, 20 nt, synthetic construct
  misc_feature 1..20: note = C9Orf72 CTCN PAM targeting sequence
  source 1..20: mol_type = other RNA
tcaggtgaattatatcatct

SEQ ID NO: 19924 - RNA, 20 nt, synthetic construct
  misc_feature 1..20: note = C9Orf72 CTCN PAM targeting sequence
  source 1..20: mol_type = other RNA
gacttatttgaccatgcaac

SEQ ID NO: 19925 - RNA, 20 nt, synthetic construct
  misc_feature 1..20: note = C9Orf72 CTCN PAM targeting sequence
  source 1..20: mol_type = other RNA
aaaaagaagagaattaatta

SEQ ID NO: 19926 - RNA, 20 nt, synthetic construct
  misc_feature 1..20: note = C9Orf72 CTCN PAM targeting sequence
  source 1..20: mol_type = other RNA
tctttttggaggatctggac

SEQ ID NO: 19927 - RNA, 20 nt, synthetic construct
  misc_feature 1..20: note = C9Orf72 CTCN PAM targeting sequence
  source 1..20: mol_type = other RNA
attaggaaaaataaaaaggc

SEQ ID NO: 19928 - RNA, 20 nt, synthetic construct
  misc_feature 1..20: note = C9Orf72 CTCN PAM targeting sequence
  source 1..20: mol_type = other RNA
tttaacataataactgtgga

SEQ ID NO: 19929 - RNA, 20 nt, synthetic construct
  misc_feature 1..20: note = C9Orf72 CTCN PAM targeting sequence
  source 1..20: mol_type = other RNA
aggttgaaaaccactccttt

SEQ ID NO: 19930 - RNA, 20 nt, synthetic construct
  misc_feature 1..20: note = C9Orf72 CTCN PAM targeting sequence
  source 1..20: mol_type = other RNA
aattaaaacaagataaaagg

SEQ ID NO: 19931 - RNA, 20 nt, synthetic construct
  misc_feature 1..20: note = C9Orf72 CTCN PAM targeting sequence
  source 1..20: mol_type = other RNA
ctcaagaggatggaggatgg

SEQ ID NO: 19932 - RNA, 20 nt, synthetic construct
  misc_feature 1..20: note = C9Orf72 CTCN PAM targeting sequence
  source 1..20: mol_type = other RNA
agaggatggaggatgggaaa

SEQ ID NO: 19933 - RNA, 20 nt, synthetic construct
  misc_feature 1..20: note = C9Orf72 CTCN PAM targeting sequence
  source 1..20: mol_type = other RNA
tgagggagaatagcttacct

SEQ ID NO: 19934 - RNA, 20 nt, synthetic construct
  misc_feature 1..20: note = C9Orf72 CTCN PAM targeting sequence
  source 1..20: mol_type = other RNA
atcctcttgagggagaatag

SEQ ID NO: 19935 - RNA, 20 nt, synthetic construct
  misc_feature 1..20: note = C9Orf72 CTCN PAM targeting sequence
  source 1..20: mol_type = other RNA
aactatggagcctttctccc

SEQ ID NO: 19936 - RNA, 20 nt, synthetic construct
  misc_feature 1..20: note = C9Orf72 CTCN PAM targeting sequence
  source 1..20: mol_type = other RNA
atagttggagtgtttttttt

SEQ ID NO: 19937 - RNA, 20 nt, synthetic construct
  misc_feature 1..20: note = C9Orf72 CTCN PAM targeting sequence
  source 1..20: mol_type = other RNA
cttcataaagcagctcggca

SEQ ID NO: 19938 - RNA, 20 nt, synthetic construct
  misc_feature 1..20: note = C9Orf72 CTCN PAM targeting sequence
  source 1..20: mol_type = other RNA
gcagtcactctgtgcaacct

SEQ ID NO: 19939 - RNA, 20 nt, synthetic construct
  misc_feature 1..20: note = C9Orf72 CTCN PAM targeting sequence
  source 1..20: mol_type = other RNA
gtgcaacctaaggctttgga

SEQ ID NO: 19940 - RNA, 20 nt, synthetic construct
  misc_feature 1..20: note = C9Orf72 CTCN PAM targeting sequence
  source 1..20: mol_type = other RNA
aaagccttaggttgcacaga

SEQ ID NO: 19941 - RNA, 20 nt, synthetic construct
  misc_feature 1..20: note = C9Orf72 CTCN PAM targeting sequence
  source 1..20: mol_type = other RNA
aacaggtggctttccatctg

SEQ ID NO: 19942 - RNA, 20 nt, synthetic construct
  misc_feature 1..20: note = C9Orf72 CTCN PAM targeting sequence
  source 1..20: mol_type = other RNA
cataaatggttatatgagaa

SEQ ID NO: 19943 - RNA, 20 nt, synthetic construct
  misc_feature 1..20: note = C9Orf72 CTCN PAM targeting sequence
  source 1..20: mol_type = other RNA
taaatggttatatgagaaat

SEQ ID NO: 19944 - RNA, 20 nt, synthetic construct
  misc_feature 1..20: note = C9Orf72 CTCN PAM targeting sequence
  source 1..20: mol_type = other RNA
tataaccatttatgagagct

SEQ ID NO: 19945 - RNA, 20 nt, synthetic construct
  misc_feature 1..20: note = C9Orf72 CTCN PAM targeting sequence
  source 1..20: mol_type = other RNA
tgtaaatatacaaagtagct

SEQ ID NO: 19946 - RNA, 20 nt, synthetic construct
  misc_feature 1..20: note = C9Orf72 CTCN PAM targeting sequence
  source 1..20: mol_type = other RNA
gaactctttctaactaatgg

SEQ ID NO: 19947 - RNA, 20 nt, synthetic construct
  misc_feature 1..20: note = C9Orf72 CTCN PAM targeting sequence
  source 1..20: mol_type = other RNA
ttctaactaatggtcagtga

SEQ ID NO: 19948 - RNA, 20 nt, synthetic construct
  misc_feature 1..20: note = C9Orf72 CTCN PAM targeting sequence
  source 1..20: mol_type = other RNA
agtagcactgaaggaaaggg

SEQ ID NO: 19949 - RNA, 20 nt, synthetic construct
  misc_feature 1..20: note = C9Orf72 CTCN PAM targeting sequence
  source 1..20: mol_type = other RNA
ctagaagggacagatttaga

SEQ ID NO: 19950 - RNA, 20 nt, synthetic construct
  misc_feature 1..20: note = C9Orf72 CTCN PAM targeting sequence
  source 1..20: mol_type = other RNA
tctatttcccaatgttatct

SEQ ID NO: 19951 - RNA, 20 nt, synthetic construct
  misc_feature 1..20: note = C9Orf72 CTCN PAM targeting sequence
  source 1..20: mol_type = other RNA
aaaccatttatacactactg

SEQ ID NO: 19952 - RNA, 20 nt, synthetic construct
  misc_feature 1..20: note = C9Orf72 CTCN PAM targeting sequence
  source 1..20: mol_type = other RNA
gaaataccagtgtcagtagt

SEQ ID NO: 19953 - RNA, 20 nt, synthetic construct
  misc_feature 1..20: note = C9Orf72 CTCN PAM targeting sequence
  source 1..20: mol_type = other RNA
gtttatttcaaactcactgt

SEQ ID NO: 19954 - RNA, 20 nt, synthetic construct
  misc_feature 1..20: note = C9Orf72 CTCN PAM targeting sequence
  source 1..20: mol_type = other RNA
ctgttgccacaaggtgtctt

SEQ ID NO: 19955 - RNA, 20 nt, synthetic construct
  misc_feature 1..20: note = C9Orf72 CTCN PAM targeting sequence
  source 1..20: mol_type = other RNA
tcaaattgctaagacacctt

SEQ ID NO: 19956 - RNA, 20 nt, synthetic construct
  misc_feature 1..20: note = C9Orf72 CTCN PAM targeting sequence
  source 1..20: mol_type = other RNA
ttatactactagatcatttt

SEQ ID NO: 19957 - RNA, 20 nt, synthetic construct
  misc_feature 1..20: note = C9Orf72 CTCN PAM targeting sequence
  source 1..20: mol_type = other RNA
ttaagactgatgatatatca

SEQ ID NO: 19958 - RNA, 20 nt, synthetic construct
  misc_feature 1..20: note = C9Orf72 CTCN PAM targeting sequence
  source 1..20: mol_type = other RNA
gcactgctacctactacaac

SEQ ID NO: 19959 - RNA, 20 nt, synthetic construct
  misc_feature 1..20: note = C9Orf72 CTCN PAM targeting sequence
  source 1..20: mol_type = other RNA
cacttgcaaacctgtggctg

SEQ ID NO: 19960 - RNA, 20 nt, synthetic construct
  misc_feature 1..20: note = C9Orf72 CTCN PAM targeting sequence
  source 1..20: mol_type = other RNA
cctacttttttttgttttta

SEQ ID NO: 19961 - RNA, 20 nt, synthetic construct
  misc_feature 1..20: note = C9Orf72 CTCN PAM targeting sequence
  source 1..20: mol_type = other RNA
tcaaataactcagaatagct

SEQ ID NO: 19962 - RNA, 20 nt, synthetic construct
  misc_feature 1..20: note = C9Orf72 CTCN PAM targeting sequence
  source 1..20: mol_type = other RNA
gaatagctttatatgataaa

SEQ ID NO: 19963 - RNA, 20 nt, synthetic construct
  misc_feature 1..20: note = C9Orf72 CTCN PAM targeting sequence
  source 1..20: mol_type = other RNA
agaaaatgtaggttcctata

SEQ ID NO: 19964 - RNA, 20 nt, synthetic construct
  misc_feature 1..20: note = C9Orf72 CTCN PAM targeting sequence
  source 1..20: mol_type = other RNA
ataagaaaatttctgtgaaa

SEQ ID NO: 19965 - RNA, 20 nt, synthetic construct
  misc_feature 1..20: note = C9Orf72 CTCN PAM targeting sequence
  source 1..20: mol_type = other RNA
acatgtcaatttcttcagct

SEQ ID NO: 19966 - RNA, 20 nt, synthetic construct
  misc_feature 1..20: note = C9Orf72 CTCN PAM targeting sequence
  source 1..20: mol_type = other RNA
ctacatgtcaatttcttcag

SEQ ID NO: 19967 - RNA, 20 nt, synthetic construct
  misc_feature 1..20: note = C9Orf72 CTCN PAM targeting sequence
  source 1..20: mol_type = other RNA
taggttaaacacactcatgc

SEQ ID NO: 19968 - RNA, 20 nt, synthetic construct
  misc_feature 1..20: note = C9Orf72 CTCN PAM targeting sequence
  source 1..20: mol_type = other RNA
tgcctctgatactccatcat

SEQ ID NO: 19969 - RNA, 20 nt, synthetic construct
  misc_feature 1..20: note = C9Orf72 CTCN PAM targeting sequence
  source 1..20: mol_type = other RNA
gatactccatcatgagccta

SEQ ID NO: 19970 - RNA, 20 nt, synthetic construct
  misc_feature 1..20: note = C9Orf72 CTCN PAM targeting sequence
  source 1..20: mol_type = other RNA
atcatgagcctaaaggaaaa

SEQ ID NO: 19971 - RNA, 20 nt, synthetic construct
  misc_feature 1..20: note = C9Orf72 CTCN PAM targeting sequence
  source 1..20: mol_type = other RNA
tgatggagtatcagaggcat

SEQ ID NO: 19972 - RNA, 20 nt, synthetic construct
  misc_feature 1..20: note = C9Orf72 CTCN PAM targeting sequence
  source 1..20: mol_type = other RNA
tttattaaaagtaaaatttc

SEQ ID NO: 19973 - RNA, 20 nt, synthetic construct
  misc_feature 1..20: note = C9Orf72 CTCN PAM targeting sequence
  source 1..20: mol_type = other RNA
acaaatactggctatttcta

SEQ ID NO: 19974 - RNA, 20 nt, synthetic construct
  misc_feature 1..20: note = C9Orf72 CTCN PAM targeting sequence
  source 1..20: mol_type = other RNA
tagctaacatttcctattta

SEQ ID NO: 19975 - RNA, 20 nt, synthetic construct
  misc_feature 1..20: note = C9Orf72 CTCN PAM targeting sequence
  source 1..20: mol_type = other RNA
atgcttataacaaccctaca

SEQ ID NO: 19976 - RNA, 20 nt, synthetic construct
  misc_feature 1..20: note = C9Orf72 CTCN PAM targeting sequence
  source 1..20: mol_type = other RNA
tctgtaaaatggcaataata

SEQ ID NO: 19977 - RNA, 20 nt, synthetic construct
  misc_feature 1..20: note = C9Orf72 CTCN PAM targeting sequence
  source 1..20: mol_type = other RNA
atacacctatttcctcatct

SEQ ID NO: 19978 - RNA, 20 nt, synthetic construct
  misc_feature 1..20: note = C9Orf72 CTCN PAM targeting sequence
  source 1..20: mol_type = other RNA
ctggattaatgctgtgtacc

SEQ ID NO: 19979 - RNA, 20 nt, synthetic construct
  misc_feature 1..20: note = C9Orf72 CTCN PAM targeting sequence
  source 1..20: mol_type = other RNA
taagtactaaactccactgc

SEQ ID NO: 19980 - RNA, 20 nt, synthetic construct
  misc_feature 1..20: note = C9Orf72 CTCN PAM targeting sequence
  source 1..20: mol_type = other RNA
actgctggatggaaaaagat

SEQ ID NO: 19981 - RNA, 20 nt, synthetic construct
  misc_feature 1..20: note = C9Orf72 CTCN PAM targeting sequence
  source 1..20: mol_type = other RNA
ttaaagctaacagaatcctt

SEQ ID NO: 19982 - RNA, 20 nt, synthetic construct
  misc_feature 1..20: note = C9Orf72 CTCN PAM targeting sequence
  source 1..20: mol_type = other RNA
gtttctttaaatagcaaatg

SEQ ID NO: 19983 - RNA, 20 nt, synthetic construct
  misc_feature 1..20: note = C9Orf72 CTCN PAM targeting sequence
  source 1..20: mol_type = other RNA
ttatatttctatatatattt

SEQ ID NO: 19984 - RNA, 20 nt, synthetic construct
  misc_feature 1..20: note = C9Orf72 CTCN PAM targeting sequence
  source 1..20: mol_type = other RNA
cctatgacaagatttggaag

SEQ ID NO: 19985 - RNA, 20 nt, synthetic construct
  misc_feature 1..20: note = C9Orf72 CTCN PAM targeting sequence
  source 1..20: mol_type = other RNA
agtaagaatttttcttttca

SEQ ID NO: 19986 - RNA, 20 nt, synthetic construct
  misc_feature 1..20: note = C9Orf72 CTCN PAM targeting sequence
  source 1..20: mol_type = other RNA
atgatgatgatattggtgac

SEQ ID NO: 19987 - RNA, 20 nt, synthetic construct
  misc_feature 1..20: note = C9Orf72 CTCN PAM targeting sequence
  source 1..20: mol_type = other RNA
gaaatgaaggcagtgtgtta

SEQ ID NO: 19988 - RNA, 20 nt, synthetic construct
  misc_feature 1..20: note = C9Orf72 CTCN PAM targeting sequence
  source 1..20: mol_type = other RNA
ccaaaaaacaatctctgtgc

SEQ ID NO: 19989 - RNA, 20 nt, synthetic construct
  misc_feature 1..20: note = C9Orf72 CTCN PAM targeting sequence
  source 1..20: mol_type = other RNA
gtgcactaccataaacttca

SEQ ID NO: 19990 - RNA, 20 nt, synthetic construct
  misc_feature 1..20: note = C9Orf72 CTCN PAM targeting sequence
  source 1..20: mol_type = other RNA
tctgagctgtcagaatcagg

SEQ ID NO: 19991 - RNA, 20 nt, synthetic construct
  misc_feature 1..20: note = C9Orf72 CTCN PAM targeting sequence
  source 1..20: mol_type = other RNA
gaagaggaagttgttcttgt

SEQ ID NO: 19992 - RNA, 20 nt, synthetic construct
  misc_feature 1..20: note = C9Orf72 CTCN PAM targeting sequence
  source 1..20: mol_type = other RNA
tgattctgacagctcagaag

SEQ ID NO: 19993 - RNA, 20 nt, synthetic construct
  misc_feature 1..20: note = C9Orf72 CTCN PAM targeting sequence
  source 1..20: mol_type = other RNA
taacactcatagtgtgtgat

SEQ ID NO: 19994 - RNA, 20 nt, synthetic construct
  misc_feature 1..20: note = C9Orf72 CTCN PAM targeting sequence
  source 1..20: mol_type = other RNA
tagtgtgtgattcaaaacgt

SEQ ID NO: 19995 - RNA, 20 nt, synthetic construct
  misc_feature 1..20: note = C9Orf72 CTCN PAM targeting sequence
  source 1..20: mol_type = other RNA
acaaatgattaaggaaacta

SEQ ID NO: 19996 - RNA, 20 nt, synthetic construct
  misc_feature 1..20: note = C9Orf72 CTCN PAM targeting sequence
  source 1..20: mol_type = other RNA
tataagagctgggatcctcc

SEQ ID NO: 19997 - RNA, 20 nt, synthetic construct
  misc_feature 1..20: note = C9Orf72 CTCN PAM targeting sequence
  source 1..20: mol_type = other RNA
tataggagcaattaatattt

SEQ ID NO: 19998 - RNA, 20 nt, synthetic construct
  misc_feature 1..20: note = C9Orf72 CTCN PAM targeting sequence
  source 1..20: mol_type = other RNA
cacttttaggaattataaaa

SEQ ID NO: 19999 - RNA, 20 nt, synthetic construct
  misc_feature 1..20: note = C9Orf72 CTCN PAM targeting sequence
  source 1..20: mol_type = other RNA
gttttgccataaaatccagg

SEQ ID NO: 20000 - RNA, 20 nt, synthetic construct
  misc_feature 1..20: note = C9Orf72 CTCN PAM targeting sequence
  source 1..20: mol_type = other RNA
taaagtgtataattgctctc

SEQ ID NO: 20001 - RNA, 20 nt, synthetic construct
  misc_feature 1..20: note = C9Orf72 CTCN PAM targeting sequence
  source 1..20: mol_type = other RNA
catttaaacttacatctatt

SEQ ID NO: 20002 - RNA, 20 nt, synthetic construct
  misc_feature 1..20: note = C9Orf72 CTCN PAM targeting sequence
  source 1..20: mol_type = other RNA
tttaaacttacatctatttc

SEQ ID NO: 20003 - RNA, 20 nt, synthetic construct
  misc_feature 1..20: note = C9Orf72 CTCN PAM targeting sequence
  source 1..20: mol_type = other RNA
agtaagcattggaataatac

SEQ ID NO: 20004 - RNA, 20 nt, synthetic construct
  misc_feature 1..20: note = C9Orf72 CTCN PAM targeting sequence
  source 1..20: mol_type = other RNA
gaccctgcacaataaagtga

SEQ ID NO: 20005 - RNA, 20 nt, synthetic construct
  misc_feature 1..20: note = C9Orf72 CTCN PAM targeting sequence
  source 1..20: mol_type = other RNA
tattacgtgattttcttcac

SEQ ID NO: 20006 - RNA, 20 nt, synthetic construct
  misc_feature 1..20: note = C9Orf72 CTCN PAM targeting sequence
  source 1..20: mol_type = other RNA
catattacgtgattttcttc

SEQ ID NO: 20007 - RNA, 20 nt, synthetic construct
  misc_feature 1..20: note = C9Orf72 CTCN PAM targeting sequence
  source 1..20: mol_type = other RNA
cttttattctttcttttctt

SEQ ID NO: 20008 - RNA, 20 nt, synthetic construct
  misc_feature 1..20: note = C9Orf72 CTCN PAM targeting sequence
  source 1..20: mol_type = other RNA
aaaaaaaaaaaagaaaagaa

SEQ ID NO: 20009 - RNA, 20 nt, synthetic construct
  misc_feature 1..20: note = C9Orf72 CTCN PAM targeting sequence
  source 1..20: mol_type = other RNA
atctcaaaaaaaaaaaaaga

SEQ ID NO: 20010 - RNA, 20 nt, synthetic construct
  misc_feature 1..20: note = C9Orf72 CTCN PAM targeting sequence
  source 1..20: mol_type = other RNA
ggctggagtgcaatggcgtg

SEQ ID NO: 20011 - RNA, 20 nt, synthetic construct
  misc_feature 1..20: note = C9Orf72 CTCN PAM targeting sequence
  source 1..20: mol_type = other RNA
agcctgagcaatgaaagcaa

SEQ ID NO: 20012 - RNA, 20 nt, synthetic construct
  misc_feature 1..20: note = C9Orf72 CTCN PAM targeting sequence
  source 1..20: mol_type = other RNA
gctcactgcaacctctcctc

SEQ ID NO: 20013 - RNA, 20 nt, synthetic construct
  misc_feature 1..20: note = C9Orf72 CTCN PAM targeting sequence
  source 1..20: mol_type = other RNA
ctgcaacctctcctcccagg

SEQ ID NO: 20014 - RNA, 20 nt, synthetic construct
  misc_feature 1..20: note = C9Orf72 CTCN PAM targeting sequence
  source 1..20: mol_type = other RNA
cctcccaggttcaagtgact

SEQ ID NO: 20015 - RNA, 20 nt, synthetic construct
  misc_feature 1..20: note = C9Orf72 CTCN PAM targeting sequence
  source 1..20: mol_type = other RNA
tcccaggttcaagtgactct

SEQ ID NO: 20016 - RNA, 20 nt, synthetic construct
  misc_feature 1..20: note = C9Orf72 CTCN PAM targeting sequence
  source 1..20: mol_type = other RNA
caggttcaagtgactctcct

SEQ ID NO: 20017 - RNA, 20 nt, synthetic construct
  misc_feature 1..20: note = C9Orf72 CTCN PAM targeting sequence
  source 1..20: mol_type = other RNA
cctgtctcatcctcccaagt

SEQ ID NO: 20018 - RNA, 20 nt, synthetic construct
  misc_feature 1..20: note = C9Orf72 CTCN PAM targeting sequence
  source 1..20: mol_type = other RNA
tgtctcatcctcccaagtag

SEQ ID NO: 20019 - RNA, 20 nt, synthetic construct
  misc_feature 1..20: note = C9Orf72 CTCN PAM targeting sequence
  source 1..20: mol_type = other RNA
tcctcccaagtagctgggac

SEQ ID NO: 20020 - RNA, 20 nt, synthetic construct
  misc_feature 1..20: note = C9Orf72 CTCN PAM targeting sequence
  source 1..20: mol_type = other RNA
caagtagctgggactatagg

SEQ ID NO: 20021 - RNA, 20 nt, synthetic construct
  misc_feature 1..20: note = C9Orf72 CTCN PAM targeting sequence
  source 1..20: mol_type = other RNA
actaaaaatacaaaaatcag

SEQ ID NO: 20022 - RNA, 20 nt, synthetic construct
  misc_feature 1..20: note = C9Orf72 CTCN PAM targeting sequence
  source 1..20: mol_type = other RNA
cttttattctttagagagta

SEQ ID NO: 20023 - RNA, 20 nt, synthetic construct
  misc_feature 1..20: note = C9Orf72 CTCN PAM targeting sequence
  source 1..20: mol_type = other RNA
aaagaataaaagtgagcttt

SEQ ID NO: 20024 - RNA, 20 nt, synthetic construct
  misc_feature 1..20: note = C9Orf72 CTCN PAM targeting sequence
  source 1..20: mol_type = other RNA
ctaaagaataaaagtgagct

SEQ ID NO: 20025 - RNA, 20 nt, synthetic construct
  misc_feature 1..20: note = C9Orf72 CTCN PAM targeting sequence
  source 1..20: mol_type = other RNA
tttagaaaagatctccttta

SEQ ID NO: 20026 - RNA, 20 nt, synthetic construct
  misc_feature 1..20: note = C9Orf72 CTCN PAM targeting sequence
  source 1..20: mol_type = other RNA
tttaaaatttgagataaaaa

SEQ ID NO: 20027 - RNA, 20 nt, synthetic construct
  misc_feature 1..20: note = C9Orf72 CTCN PAM targeting sequence
  source 1..20: mol_type = other RNA
aattttaaaggagatctttt

SEQ ID NO: 20028 - RNA, 20 nt, synthetic construct
  misc_feature 1..20: note = C9Orf72 CTCN PAM targeting sequence
  source 1..20: mol_type = other RNA
tttttaaatatgaaatatat

SEQ ID NO: 20029 - RNA, 20 nt, synthetic construct
  misc_feature 1..20: note = C9Orf72 CTCN PAM targeting sequence
  source 1..20: mol_type = other RNA
atactcataaaagtataatc

SEQ ID NO: 20030 - RNA, 20 nt, synthetic construct
  misc_feature 1..20: note = C9Orf72 CTCN PAM targeting sequence
  source 1..20: mol_type = other RNA
taaaagtataatctacccaa

SEQ ID NO: 20031 - RNA, 20 nt, synthetic construct
  misc_feature 1..20: note = C9Orf72 CTCN PAM targeting sequence
  source 1..20: mol_type = other RNA
aaagggaatttttctgtttt

SEQ ID NO: 20032 - RNA, 20 nt, synthetic construct
  misc_feature 1..20: note = C9Orf72 CTCN PAM targeting sequence
  source 1..20: mol_type = other RNA
aatatggatggtccctcatt

SEQ ID NO: 20033 - RNA, 20 nt, synthetic construct
  misc_feature 1..20: note = C9Orf72 CTCN PAM targeting sequence
  source 1..20: mol_type = other RNA
tttattcactaccaccacca

SEQ ID NO: 20034 - RNA, 20 nt, synthetic construct
  misc_feature 1..20: note = C9Orf72 CTCN PAM targeting sequence
  source 1..20: mol_type = other RNA
tcagttttgtgaccaacttg

SEQ ID NO: 20035 - RNA, 20 nt, synthetic construct
  misc_feature 1..20: note = C9Orf72 CTCN PAM targeting sequence
  source 1..20: mol_type = other RNA
aaaaatttacttaaccaagt

SEQ ID NO: 20036 - RNA, 20 nt, synthetic construct
  misc_feature 1..20: note = C9Orf72 CTCN PAM targeting sequence
  source 1..20: mol_type = other RNA
cttattttatgaaatgattt

SEQ ID NO: 20037 - RNA, 20 nt, synthetic construct
  misc_feature 1..20: note = C9Orf72 CTCN PAM targeting sequence
  source 1..20: mol_type = other RNA
aagtcttcataagcatcttt

SEQ ID NO: 20038 - RNA, 20 nt, synthetic construct
  misc_feature 1..20: note = C9Orf72 CTCN PAM targeting sequence
  source 1..20: mol_type = other RNA
aaaaatggccctgggtctga

SEQ ID NO: 20039 - RNA, 20 nt, synthetic construct
  misc_feature 1..20: note = C9Orf72 CTCN PAM targeting sequence
  source 1..20: mol_type = other RNA
gaaaaactggttaaggttac

SEQ ID NO: 20040 - RNA, 20 nt, synthetic construct
  misc_feature 1..20: note = C9Orf72 CTCN PAM targeting sequence
  source 1..20: mol_type = other RNA
agcaacttaataatatgggg

SEQ ID NO: 20041 - RNA, 20 nt, synthetic construct
  misc_feature 1..20: note = C9Orf72 CTCN PAM targeting sequence
  source 1..20: mol_type = other RNA
acaactaactattcactgtt

SEQ ID NO: 20042 - RNA, 20 nt, synthetic construct
  misc_feature 1..20: note = C9Orf72 CTCN PAM targeting sequence
  source 1..20: mol_type = other RNA
caacgactttattttgaaca

SEQ ID NO: 20043 - RNA, 20 nt, synthetic construct
  misc_feature 1..20: note = C9Orf72 CTCN PAM targeting sequence
  source 1..20: mol_type = other RNA
atcaaaaggcaactcctcct

SEQ ID NO: 20044 - RNA, 20 nt, synthetic construct
  misc_feature 1..20: note = C9Orf72 CTCN PAM targeting sequence
  source 1..20: mol_type = other RNA
tccttttcgggaagaataat

SEQ ID NO: 20045 - RNA, 20 nt, synthetic construct
  misc_feature 1..20: note = C9Orf72 CTCN PAM targeting sequence
  source 1..20: mol_type = other RNA
ttttcgggaagaataatttt

SEQ ID NO: 20046 - RNA, 20 nt, synthetic construct
  misc_feature 1..20: note = C9Orf72 CTCN PAM targeting sequence
  source 1..20: mol_type = other RNA
taggtttaagcatacatagt

SEQ ID NO: 20047 - RNA, 20 nt, synthetic construct
  misc_feature 1..20: note = C9Orf72 CTCN PAM targeting sequence
  source 1..20: mol_type = other RNA
gacattatcagtataagtga

SEQ ID NO: 20048 - RNA, 20 nt, synthetic construct
  misc_feature 1..20: note = C9Orf72 CTCN PAM targeting sequence
  source 1..20: mol_type = other RNA
ctgaagctcaacaacaccaa

SEQ ID NO: 20049 - RNA, 20 nt, synthetic construct
  misc_feature 1..20: note = C9Orf72 CTCN PAM targeting sequence
  source 1..20: mol_type = other RNA
acaacaccaaaaaaaaaaaa

SEQ ID NO: 20050 - RNA, 20 nt, synthetic construct
  misc_feature 1..20: note = C9Orf72 CTCN PAM targeting sequence
  source 1..20: mol_type = other RNA
tctgtatttagccctgtagg

SEQ ID NO: 20051 - RNA, 20 nt, synthetic construct
  misc_feature 1..20: note = C9Orf72 CTCN PAM targeting sequence
  source 1..20: mol_type = other RNA
aaaagaaaatctcttaagtt

SEQ ID NO: 20052 - RNA, 20 nt, synthetic construct
  misc_feature 1..20: note = C9Orf72 CTCN PAM targeting sequence
  source 1..20: mol_type = other RNA
taagtttctattcctccttg

SEQ ID NO: 20053 - RNA, 20 nt, synthetic construct
  misc_feature 1..20: note = C9Orf72 CTCN PAM targeting sequence
  source 1..20: mol_type = other RNA
ttgtacttcccaaacttgaa

SEQ ID NO: 20054 - RNA, 20 nt, synthetic construct
  misc_feature 1..20: note = C9Orf72 CTCN PAM targeting sequence
  source 1..20: mol_type = other RNA
gcagtaagataacattttta

SEQ ID NO: 20055 - RNA, 20 nt, synthetic construct
  misc_feature 1..20: note = C9Orf72 CTCN PAM targeting sequence
  source 1..20: mol_type = other RNA
tcttaaaaatgttatcttac

SEQ ID NO: 20056 - RNA, 20 nt, synthetic construct
  misc_feature 1..20: note = C9Orf72 CTCN PAM targeting sequence
  source 1..20: mol_type = other RNA
tttaagtgctcttcttaaaa

SEQ ID NO: 20057 - RNA, 20 nt, synthetic construct
  misc_feature 1..20: note = C9Orf72 CTCN PAM targeting sequence
  source 1..20: mol_type = other RNA
cttttaagtgctcttcttaa

SEQ ID NO: 20058 - RNA, 20 nt, synthetic construct
  misc_feature 1..20: note = C9Orf72 CTCN PAM targeting sequence
  source 1..20: mol_type = other RNA
acttgcgataagtttactta

SEQ ID NO: 20059 - RNA, 20 nt, synthetic construct
  misc_feature 1..20: note = C9Orf72 CTCN PAM targeting sequence
  source 1..20: mol_type = other RNA
aacccactagttattagtag

SEQ ID NO: 20060 - RNA, 20 nt, synthetic construct
  misc_feature 1..20: note = C9Orf72 CTCN PAM targeting sequence
  source 1..20: mol_type = other RNA
gaattggaaagctatctaca

SEQ ID NO: 20061 - RNA, 20 nt, synthetic construct
  misc_feature 1..20: note = C9Orf72 CTCN PAM targeting sequence
  source 1..20: mol_type = other RNA
tttaccaaattgttatgttt

SEQ ID NO: 20062 - RNA, 20 nt, synthetic construct
  misc_feature 1..20: note = C9Orf72 CTCN PAM targeting sequence
  source 1..20: mol_type = other RNA
ttcatgctaaaaagaagcaa

SEQ ID NO: 20063 - RNA, 20 nt, synthetic construct
  misc_feature 1..20: note = C9Orf72 CTCN PAM targeting sequence
  source 1..20: mol_type = other RNA
aatattttaaacatggctgt

SEQ ID NO: 20064 - RNA, 20 nt, synthetic construct
  misc_feature 1..20: note = C9Orf72 CTCN PAM targeting sequence
  source 1..20: mol_type = other RNA
ttgtaaaactccaatatttt

SEQ ID NO: 20065 - RNA, 20 nt, synthetic construct
  misc_feature 1..20: note = C9Orf72 CTCN PAM targeting sequence
  source 1..20: mol_type = other RNA
atgctccttgtaaaactcca

SEQ ID NO: 20066 - RNA, 20 nt, synthetic construct
  misc_feature 1..20: note = C9Orf72 CTCN PAM targeting sequence
  source 1..20: mol_type = other RNA
tgtgggtgaccctcaatgct

SEQ ID NO: 20067 - RNA, 20 nt, synthetic construct
  misc_feature 1..20: note = C9Orf72 CTCN PAM targeting sequence
  source 1..20: mol_type = other RNA
ttcttcactggagattctcc

SEQ ID NO: 20068 - RNA, 20 nt, synthetic construct
  misc_feature 1..20: note = C9Orf72 CTCN PAM targeting sequence
  source 1..20: mol_type = other RNA
agtgaagaaagagttcttca

SEQ ID NO: 20069 - RNA, 20 nt, synthetic construct
  misc_feature 1..20: note = C9Orf72 CTCN PAM targeting sequence
  source 1..20: mol_type = other RNA
ttcaaaagaacttctctgct

SEQ ID NO: 20070 - RNA, 20 nt, synthetic construct
  misc_feature 1..20: note = C9Orf72 CTCN PAM targeting sequence
  source 1..20: mol_type = other RNA
gctttacagtgaaatagtct

SEQ ID NO: 20071 - RNA, 20 nt, synthetic construct
  misc_feature 1..20: note = C9Orf72 CTCN PAM targeting sequence
  source 1..20: mol_type = other RNA
aactcttagtgtctgttcct

SEQ ID NO: 20072 - RNA, 20 nt, synthetic construct
  misc_feature 1..20: note = C9Orf72 CTCN PAM targeting sequence
  source 1..20: mol_type = other RNA
tagtgtctgttcctgagggg

SEQ ID NO: 20073 - RNA, 20 nt, synthetic construct
  misc_feature 1..20: note = C9Orf72 CTCN PAM targeting sequence
  source 1..20: mol_type = other RNA
ggaacagacactaagagttt

SEQ ID NO: 20074 - RNA, 20 nt, synthetic construct
  misc_feature 1..20: note = C9Orf72 CTCN PAM targeting sequence
  source 1..20: mol_type = other RNA
aggaaaatgtgccatgttta

SEQ ID NO: 20075 - RNA, 20 nt, synthetic construct
  misc_feature 1..20: note = C9Orf72 CTCN PAM targeting sequence
  source 1..20: mol_type = other RNA
tctaggaaaatgtgccatgt

SEQ ID NO: 20076 - RNA, 20 nt, synthetic construct
  misc_feature 1..20: note = C9Orf72 CTCN PAM targeting sequence
  source 1..20: mol_type = other RNA
cctctaggaaaatgtgccat

SEQ ID NO: 20077 - RNA, 20 nt, synthetic construct
  misc_feature 1..20: note = C9Orf72 CTCN PAM targeting sequence
  source 1..20: mol_type = other RNA
tgcaatttacattttattcc

SEQ ID NO: 20078 - RNA, 20 nt, synthetic construct
  misc_feature 1..20: note = C9Orf72 CTCN PAM targeting sequence
  source 1..20: mol_type = other RNA
ggggtacatatgctctcctt

SEQ ID NO: 20079 - RNA, 20 nt, synthetic construct
  misc_feature 1..20: note = C9Orf72 CTCN PAM targeting sequence
  source 1..20: mol_type = other RNA
ccttctgttacagctacttc

SEQ ID NO: 20080 - RNA, 20 nt, synthetic construct
  misc_feature 1..20: note = C9Orf72 CTCN PAM targeting sequence
  source 1..20: mol_type = other RNA
ttctgttacagctacttcta

SEQ ID NO: 20081 - RNA, 20 nt, synthetic construct
  misc_feature 1..20: note = C9Orf72 CTCN PAM targeting sequence
  source 1..20: mol_type = other RNA
aacctttccctagaagtagc

SEQ ID NO: 20082 - RNA, 20 nt, synthetic construct
  misc_feature 1..20: note = C9Orf72 CTCN PAM targeting sequence
  source 1..20: mol_type = other RNA
gatatgttctttaaggtact

SEQ ID NO: 20083 - RNA, 20 nt, synthetic construct
  misc_feature 1..20: note = C9Orf72 CTCN PAM targeting sequence
  source 1..20: mol_type = other RNA
ctttttttttctgtttgccc

SEQ ID NO: 20084 - RNA, 20 nt, synthetic construct
  misc_feature 1..20: note = C9Orf72 CTCN PAM targeting sequence
  source 1..20: mol_type = other RNA
ttgggtttaagatatggaaa

SEQ ID NO: 20085 - RNA, 20 nt, synthetic construct
  misc_feature 1..20: note = C9Orf72 CTCN PAM targeting sequence
  source 1..20: mol_type = other RNA
agtttattctgtacacctcc

SEQ ID NO: 20086 - RNA, 20 nt, synthetic construct
  misc_feature 1..20: note = C9Orf72 CTCN PAM targeting sequence
  source 1..20: mol_type = other RNA
ataaaagctccattaaaggc

SEQ ID NO: 20087 - RNA, 20 nt, synthetic construct
  misc_feature 1..20: note = C9Orf72 CTCN PAM targeting sequence
  source 1..20: mol_type = other RNA
attaaaggcttattcgtatg

SEQ ID NO: 20088 - RNA, 20 nt, synthetic construct
  misc_feature 1..20: note = C9Orf72 CTCN PAM targeting sequence
  source 1..20: mol_type = other RNA
aaggccttgacaaatgtagc

SEQ ID NO: 20089 - RNA, 20 nt, synthetic construct
  misc_feature 1..20: note = C9Orf72 CTCN PAM targeting sequence
  source 1..20: mol_type = other RNA
cagcatgtatctgtataagg

SEQ ID NO: 20090 - RNA, 20 nt, synthetic construct
  misc_feature 1..20: note = C9Orf72 CTCN PAM targeting sequence
  source 1..20: mol_type = other RNA
ctgtgccttctaagataatc

SEQ ID NO: 20091 - RNA, 20 nt, synthetic construct
  misc_feature 1..20: note = C9Orf72 CTCN PAM targeting sequence
  source 1..20: mol_type = other RNA
gtgccttctaagataatctt

SEQ ID NO: 20092 - RNA, 20 nt, synthetic construct
  misc_feature 1..20: note = C9Orf72 CTCN PAM targeting sequence
  source 1..20: mol_type = other RNA
ggaaagacaagaaaatgtcc

SEQ ID NO: 20093 - RNA, 20 nt, synthetic construct
  misc_feature 1..20: note = C9Orf72 CTCN PAM targeting sequence
  source 1..20: mol_type = other RNA
tgctcaggaaagacaagaaa

SEQ ID NO: 20094 - RNA, 20 nt, synthetic construct
  misc_feature 1..20: note = C9Orf72 CTCN PAM targeting sequence
  source 1..20: mol_type = other RNA
taaacaatacaaaataaaat

SEQ ID NO: 20095 - RNA, 20 nt, synthetic construct
  misc_feature 1..20: note = C9Orf72 CTCN PAM targeting sequence
  source 1..20: mol_type = other RNA
tgattttaagagtttcataa

SEQ ID NO: 20096 - RNA, 20 nt, synthetic construct
  misc_feature 1..20: note = C9Orf72 CTCN PAM targeting sequence
  source 1..20: mol_type = other RNA
taaaatcaggagaatctttt

SEQ ID NO: 20097 - RNA, 20 nt, synthetic construct
  misc_feature 1..20: note = C9Orf72 CTCN PAM targeting sequence
  source 1..20: mol_type = other RNA
cattatgaaactcttaaaat

SEQ ID NO: 20098 - RNA, 20 nt, synthetic construct
  misc_feature 1..20: note = C9Orf72 CTCN PAM targeting sequence
  source 1..20: mol_type = other RNA
ttcctgtgttccagtttgat

SEQ ID NO: 20099 - RNA, 20 nt, synthetic construct
  misc_feature 1..20: note = C9Orf72 CTCN PAM targeting sequence
  source 1..20: mol_type = other RNA
tgggaaccattccattcaac

SEQ ID NO: 20100 - RNA, 20 nt, synthetic construct
  misc_feature 1..20: note = C9Orf72 CTCN PAM targeting sequence
  source 1..20: mol_type = other RNA
tcattttatgaacctgggaa

SEQ ID NO: 20101 - RNA, 20 nt, synthetic construct
  misc_feature 1..20: note = C9Orf72 CTCN PAM targeting sequence
  source 1..20: mol_type = other RNA
ttttatgaacctgggaactt

SEQ ID NO: 20102 - RNA, 20 nt, synthetic construct
  misc_feature 1..20: note = C9Orf72 CTCN PAM targeting sequence
  source 1..20: mol_type = other RNA
ttgccaagttcccaggttca

SEQ ID NO: 20103 - RNA, 20 nt, synthetic construct
  misc_feature 1..20: note = C9Orf72 CTCN PAM targeting sequence
  source 1..20: mol_type = other RNA
ttaacctctttgccaagttc

SEQ ID NO: 20104 - RNA, 20 nt, synthetic construct
  misc_feature 1..20: note = C9Orf72 CTCN PAM targeting sequence
  source 1..20: mol_type = other RNA
aataccttttgtttcccttt

SEQ ID NO: 20105 - RNA, 20 nt, synthetic construct
  misc_feature 1..20: note = C9Orf72 CTCN PAM targeting sequence
  source 1..20: mol_type = other RNA
caagaagaatccagggtcta

SEQ ID NO: 20106 - RNA, 20 nt, synthetic construct
  misc_feature 1..20: note = C9Orf72 CTCN PAM targeting sequence
  source 1..20: mol_type = other RNA
acattatagatgaaaagcta

SEQ ID NO: 20107 - RNA, 20 nt, synthetic construct
  misc_feature 1..20: note = C9Orf72 CTCN PAM targeting sequence
  source 1..20: mol_type = other RNA
atgaagtgggaggtagaaac

SEQ ID NO: 20108 - RNA, 20 nt, synthetic construct
  misc_feature 1..20: note = C9Orf72 CTCN PAM targeting sequence
  source 1..20: mol_type = other RNA
cacttcatagagtgtgtgtt

SEQ ID NO: 20109 - RNA, 20 nt, synthetic construct
  misc_feature 1..20: note = C9Orf72 CTCN PAM targeting sequence
  source 1..20: mol_type = other RNA
cttttcagacaagacaaaaa

SEQ ID NO: 20110 - RNA, 20 nt, synthetic construct
  misc_feature 1..20: note = C9Orf72 CTCN PAM targeting sequence
  source 1..20: mol_type = other RNA
ctgcatttcgaaggatttct

SEQ ID NO: 20111 - RNA, 20 nt, synthetic construct
  misc_feature 1..20: note = C9Orf72 CTCN PAM targeting sequence
  source 1..20: mol_type = other RNA
gcatttcgaaggatttctcc

SEQ ID NO: 20112 - RNA, 20 nt, synthetic construct
  misc_feature 1..20: note = C9Orf72 CTCN PAM targeting sequence
  source 1..20: mol_type = other RNA
atttagagtgtggttggcaa

SEQ ID NO: 20113 - RNA, 20 nt, synthetic construct
  misc_feature 1..20: note = C9Orf72 CTCN PAM targeting sequence
  source 1..20: mol_type = other RNA
aaatggagaaatccttcgaa

SEQ ID NO: 20114 - RNA, 20 nt, synthetic construct
  misc_feature 1..20: note = C9Orf72 CTCN PAM targeting sequence
  source 1..20: mol_type = other RNA
atcactgagaagtacctgtt

SEQ ID NO: 20115 - RNA, 20 nt, synthetic construct
  misc_feature 1..20: note = C9Orf72 CTCN PAM targeting sequence
  source 1..20: mol_type = other RNA
gtgatggagaaataactttt

SEQ ID NO: 20116 - RNA, 20 nt, synthetic construct
  misc_feature 1..20: note = C9Orf72 CTCN PAM targeting sequence
  source 1..20: mol_type = other RNA
aaagacagaacaggtacttc

SEQ ID NO: 20117 - RNA, 20 nt, synthetic construct
  misc_feature 1..20: note = C9Orf72 CTCN PAM targeting sequence
  source 1..20: mol_type = other RNA
aggaccaagaatattgtccc

SEQ ID NO: 20118 - RNA, 20 nt, synthetic construct
  misc_feature 1..20: note = C9Orf72 CTCN PAM targeting sequence
  source 1..20: mol_type = other RNA
gtcttggcaacagctggaga

SEQ ID NO: 20119 - RNA, 20 nt, synthetic construct
  misc_feature 1..20: note = C9Orf72 CTCN PAM targeting sequence
  source 1..20: mol_type = other RNA
agctgttgccaagacagaga

SEQ ID NO: 20120 - RNA, 20 nt, synthetic construct
  misc_feature 1..20: note = C9Orf72 CTCN PAM targeting sequence
  source 1..20: mol_type = other RNA
ttgcccaccgccatctccag

SEQ ID NO: 20121 - RNA, 20 nt, synthetic construct
  misc_feature 1..20: note = C9Orf72 CTCN PAM targeting sequence
  source 1..20: mol_type = other RNA
ggagatatctaaacaatgac

SEQ ID NO: 20122 - RNA, 20 nt, synthetic construct
  misc_feature 1..20: note = C9Orf72 CTCN PAM targeting sequence
  source 1..20: mol_type = other RNA
ggagcatttggataatgtga

SEQ ID NO: 20123 - RNA, 20 nt, synthetic construct
  misc_feature 1..20: note = C9Orf72 CTCN PAM targeting sequence
  source 1..20: mol_type = other RNA
taagtcaaagatgtggaatc

SEQ ID NO: 20124 - RNA, 20 nt, synthetic construct
  misc_feature 1..20: note = C9Orf72 CTCN PAM targeting sequence
  source 1..20: mol_type = other RNA
tatcaggataaagacattca

SEQ ID NO: 20125 - RNA, 20 nt, synthetic construct
  misc_feature 1..20: note = C9Orf72 CTCN PAM targeting sequence
  source 1..20: mol_type = other RNA
tagaatagacccgcagtatt

SEQ ID NO: 20126 - RNA, 20 nt, synthetic construct
  misc_feature 1..20: note = C9Orf72 CTCN PAM targeting sequence
  source 1..20: mol_type = other RNA
agtcatactagaattgcaca

SEQ ID NO: 20127 - RNA, 20 nt, synthetic construct
  misc_feature 1..20: note = C9Orf72 CTCN PAM targeting sequence
  source 1..20: mol_type = other RNA
tttttagttgctatgggtta

SEQ ID NO: 20128 - RNA, 20 nt, synthetic construct
  misc_feature 1..20: note = C9Orf72 CTCN PAM targeting sequence
  source 1..20: mol_type = other RNA
gctagagactgacacttgtg

SEQ ID NO: 20129 - RNA, 20 nt, synthetic construct
  misc_feature 1..20: note = C9Orf72 CTCN PAM targeting sequence
  source 1..20: mol_type = other RNA
agctgagcctttcccttcct

SEQ ID NO: 20130 - RNA, 20 nt, synthetic construct
  misc_feature 1..20: note = C9Orf72 CTCN PAM targeting sequence
  source 1..20: mol_type = other RNA
aatccagtatgaccccattt

SEQ ID NO: 20131 - RNA, 20 nt, synthetic construct
  misc_feature 1..20: note = C9Orf72 CTCN PAM targeting sequence
  source 1..20: mol_type = other RNA
ttataaacacagcagttatt

SEQ ID NO: 20132 - RNA, 20 nt, synthetic construct
  misc_feature 1..20: note = C9Orf72 CTCN PAM targeting sequence
  source 1..20: mol_type = other RNA
ccttataaacacagcagtta

SEQ ID NO: 20133 - RNA, 20 nt, synthetic construct
  misc_feature 1..20: note = C9Orf72 CTCN PAM targeting sequence
  source 1..20: mol_type = other RNA
ctccttataaacacagcagt

SEQ ID NO: 20134 - RNA, 20 nt, synthetic construct
  misc_feature 1..20: note = C9Orf72 CTCN PAM targeting sequence
  source 1..20: mol_type = other RNA
aaatctctctccttataaac

SEQ ID NO: 20135 - RNA, 20 nt, synthetic construct
  misc_feature 1..20: note = C9Orf72 CTCN PAM targeting sequence
  source 1..20: mol_type = other RNA
gtgtctccaaatctctctcc

SEQ ID NO: 20136 - RNA, 20 nt, synthetic construct
  misc_feature 1..20: note = C9Orf72 CTCN PAM targeting sequence
  source 1..20: mol_type = other RNA
ggattgctggtaaccaccag

SEQ ID NO: 20137 - RNA, 20 nt, synthetic construct
  misc_feature 1..20: note = C9Orf72 CTCN PAM targeting sequence
  source 1..20: mol_type = other RNA
tcctggcttctggtggttac

SEQ ID NO: 20138 - RNA, 20 nt, synthetic construct
  misc_feature 1..20: note = C9Orf72 CTCN PAM targeting sequence
  source 1..20: mol_type = other RNA
ttccttgcctcttcctggct

SEQ ID NO: 20139 - RNA, 20 nt, synthetic construct
  misc_feature 1..20: note = C9Orf72 CTCN PAM targeting sequence
  source 1..20: mol_type = other RNA
cttgaagatcatgcccctgt

SEQ ID NO: 20140 - RNA, 20 nt, synthetic construct
  misc_feature 1..20: note = C9Orf72 CTCN PAM targeting sequence
  source 1..20: mol_type = other RNA
tgaagatcatgcccctgtca

SEQ ID NO: 20141 - RNA, 20 nt, synthetic construct
  misc_feature 1..20: note = C9Orf72 CTCN PAM targeting sequence
  source 1..20: mol_type = other RNA
caattctagaagctagaagt

SEQ ID NO: 20142 - RNA, 20 nt, synthetic construct
  misc_feature 1..20: note = C9Orf72 CTCN PAM targeting sequence
  source 1..20: mol_type = other RNA
cacaattctagaagctagaa

SEQ ID NO: 20143 - RNA, 20 nt, synthetic construct
  misc_feature 1..20: note = C9Orf72 CTCN PAM targeting sequence
  source 1..20: mol_type = other RNA
gtttgtggtgctttgttaag

SEQ ID NO: 20144 - RNA, 20 nt, synthetic construct
  misc_feature 1..20: note = C9Orf72 CTCN PAM targeting sequence
  source 1..20: mol_type = other RNA
agacttgtggtatttccatg

SEQ ID NO: 20145 - RNA, 20 nt, synthetic construct
  misc_feature 1..20: note = C9Orf72 CTCN PAM targeting sequence
  source 1..20: mol_type = other RNA
gtgaactctctggttatgag

SEQ ID NO: 20146 - RNA, 20 nt, synthetic construct
  misc_feature 1..20: note = C9Orf72 CTCN PAM targeting sequence
  source 1..20: mol_type = other RNA
ctggttatgagaatactgaa

SEQ ID NO: 20147 - RNA, 20 nt, synthetic construct
  misc_feature 1..20: note = C9Orf72 CTCN PAM targeting sequence
  source 1..20: mol_type = other RNA
ggttatgagaatactgaagc

SEQ ID NO: 20148 - RNA, 20 nt, synthetic construct
  misc_feature 1..20: note = C9Orf72 CTCN PAM targeting sequence
  source 1..20: mol_type = other RNA
taaccagagagttcactgag

SEQ ID NO: 20149 - RNA, 20 nt, synthetic construct
  misc_feature 1..20: note = C9Orf72 CTCN PAM targeting sequence
  source 1..20: mol_type = other RNA
ttgcagtgatgaaatgctgt

SEQ ID NO: 20150 - RNA, 20 nt, synthetic construct
  misc_feature 1..20: note = C9Orf72 CTCN PAM targeting sequence
  source 1..20: mol_type = other RNA
ctttgcagtgatgaaatgct

SEQ ID NO: 20151 - RNA, 20 nt, synthetic construct
  misc_feature 1..20: note = C9Orf72 CTCN PAM targeting sequence
  source 1..20: mol_type = other RNA
ttaaattcaaaggcttgaac

SEQ ID NO: 20152 - RNA, 20 nt, synthetic construct
  misc_feature 1..20: note = C9Orf72 CTCN PAM targeting sequence
  source 1..20: mol_type = other RNA
tgtctgttttctcattaaat

SEQ ID NO: 20153 - RNA, 20 nt, synthetic construct
  misc_feature 1..20: note = C9Orf72 CTCN PAM targeting sequence
  source 1..20: mol_type = other RNA
tcatgtctgttttctcatta

SEQ ID NO: 20154 - RNA, 20 nt, synthetic construct
  misc_feature 1..20: note = C9Orf72 CTCN PAM targeting sequence
  source 1..20: mol_type = other RNA
catccaagacagaacccagg

SEQ ID NO: 20155 - RNA, 20 nt, synthetic construct
  misc_feature 1..20: note = C9Orf72 CTCN PAM targeting sequence
  source 1..20: mol_type = other RNA
tggtccccttgctcaacttg

SEQ ID NO: 20156 - RNA, 20 nt, synthetic construct
  misc_feature 1..20: note = C9Orf72 CTCN PAM targeting sequence
  source 1..20: mol_type = other RNA
acttgtacatcttaatccac

SEQ ID NO: 20157 - RNA, 20 nt, synthetic construct
  misc_feature 1..20: note = C9Orf72 CTCN PAM targeting sequence
  source 1..20: mol_type = other RNA
aaaaaggtacatcctatgtg

SEQ ID NO: 20158 - RNA, 20 nt, synthetic construct
  misc_feature 1..20: note = C9Orf72 CTCN PAM targeting sequence
  source 1..20: mol_type = other RNA
aaaataacaataaaaggcat

SEQ ID NO: 20159 - RNA, 20 nt, synthetic construct
  misc_feature 1..20: note = C9Orf72 CTCN PAM targeting sequence
  source 1..20: mol_type = other RNA
ttctacttttttttttttta

SEQ ID NO: 20160 - RNA, 20 nt, synthetic construct
  misc_feature 1..20: note = C9Orf72 CTCN PAM targeting sequence
  source 1..20: mol_type = other RNA
ggcaagtccttcaggaggta

SEQ ID NO: 20161 - RNA, 20 nt, synthetic construct
  misc_feature 1..20: note = C9Orf72 CTCN PAM targeting sequence
  source 1..20: mol_type = other RNA
tgaaggacttgcctgaggct

SEQ ID NO: 20162 - RNA, 20 nt, synthetic construct
  misc_feature 1..20: note = C9Orf72 CTCN PAM targeting sequence
  source 1..20: mol_type = other RNA
acatcttgtcccactggaag

SEQ ID NO: 20163 - RNA, 20 nt, synthetic construct
  misc_feature 1..20: note = C9Orf72 CTCN PAM targeting sequence
  source 1..20: mol_type = other RNA
ctgccttccacctccacatc

SEQ ID NO: 20164 - RNA, 20 nt, synthetic construct
  misc_feature 1..20: note = C9Orf72 CTCN PAM targeting sequence
  source 1..20: mol_type = other RNA
cttccacctcactgccttcc

SEQ ID NO: 20165 - RNA, 20 nt, synthetic construct
  misc_feature 1..20: note = C9Orf72 CTCN PAM targeting sequence
  source 1..20: mol_type = other RNA
ctcactgactcacccagagc

SEQ ID NO: 20166 - RNA, 20 nt, synthetic construct
  misc_feature 1..20: note = C9Orf72 CTCN PAM targeting sequence
  source 1..20: mol_type = other RNA
ctgactcacccagagcaact

SEQ ID NO: 20167 - RNA, 20 nt, synthetic construct
  misc_feature 1..20: note = C9Orf72 CTCN PAM targeting sequence
  source 1..20: mol_type = other RNA
cccagagcaacttctagtcc

SEQ ID NO: 20168 - RNA, 20 nt, synthetic construct
  misc_feature 1..20: note = C9Orf72 CTCN PAM targeting sequence
  source 1..20: mol_type = other RNA
gggtgagtcagtgagtgagt

SEQ ID NO: 20169 - RNA, 20 nt, synthetic construct
  misc_feature 1..20: note = C9Orf72 CTCN PAM targeting sequence
  source 1..20: mol_type = other RNA
attcgtggtaagtggcctac

SEQ ID NO: 20170 - RNA, 20 nt, synthetic construct
  misc_feature 1..20: note = C9Orf72 CTCN PAM targeting sequence
  source 1..20: mol_type = other RNA
gtttgcatatatttagataa

SEQ ID NO: 20171 - RNA, 20 nt, synthetic construct
  misc_feature 1..20: note = C9Orf72 CTCN PAM targeting sequence
  source 1..20: mol_type = other RNA
taggccacaaacctgtacaa

SEQ ID NO: 20172 - RNA, 20 nt, synthetic construct
  misc_feature 1..20: note = C9Orf72 CTCN PAM targeting sequence
  source 1..20: mol_type = other RNA
atgatgtttgcataatgaca

SEQ ID NO: 20173 - RNA, 20 nt, synthetic construct
  misc_feature 1..20: note = C9Orf72 CTCN PAM targeting sequence
  source 1..20: mol_type = other RNA
caaagcaatcatatggcaaa

SEQ ID NO: 20174 - RNA, 20 nt, synthetic construct
  misc_feature 1..20: note = C9Orf72 CTCN PAM targeting sequence
  source 1..20: mol_type = other RNA
tgacaagatgtggatgaaat

SEQ ID NO: 20175 - RNA, 20 nt, synthetic construct
  misc_feature 1..20: note = C9Orf72 CTCN PAM targeting sequence
  source 1..20: mol_type = other RNA
cttgacaagatgtggatgaa

SEQ ID NO: 20176 - RNA, 20 nt, synthetic construct
  misc_feature 1..20: note = C9Orf72 CTCN PAM targeting sequence
  source 1..20: mol_type = other RNA
gtaaatagaagtcagtgctt

SEQ ID NO: 20177 - RNA, 20 nt, synthetic construct
  misc_feature 1..20: note = C9Orf72 CTCN PAM targeting sequence
  source 1..20: mol_type = other RNA
tctaatgctctgtaaataga

SEQ ID NO: 20178 - RNA, 20 nt, synthetic construct
  misc_feature 1..20: note = C9Orf72 CTCN PAM targeting sequence
  source 1..20: mol_type = other RNA
taatatgataaaagcactca

SEQ ID NO: 20179 - RNA, 20 nt, synthetic construct
  misc_feature 1..20: note = C9Orf72 CTCN PAM targeting sequence
  source 1..20: mol_type = other RNA
gtatgcctactcataatatg

SEQ ID NO: 20180 - RNA, 20 nt, synthetic construct
  misc_feature 1..20: note = C9Orf72 CTCN PAM targeting sequence
  source 1..20: mol_type = other RNA
aagtatgtacagaaatggtt

SEQ ID NO: 20181 - RNA, 20 nt, synthetic construct
  misc_feature 1..20: note = C9Orf72 CTCN PAM targeting sequence
  source 1..20: mol_type = other RNA
taagactattaaattgatac

SEQ ID NO: 20182 - RNA, 20 nt, synthetic construct
  misc_feature 1..20: note = C9Orf72 CTCN PAM targeting sequence
  source 1..20: mol_type = other RNA
agtttgctgttgttagttat

SEQ ID NO: 20183 - RNA, 20 nt, synthetic construct
  misc_feature 1..20: note = C9Orf72 CTCN PAM targeting sequence
  source 1..20: mol_type = other RNA
aatatttcatcattaaactg

SEQ ID NO: 20184 - RNA, 20 nt, synthetic construct
  misc_feature 1..20: note = C9Orf72 CTCN PAM targeting sequence
  source 1..20: mol_type = other RNA
agggttcagttctgttttag

SEQ ID NO: 20185 - RNA, 20 nt, synthetic construct
  misc_feature 1..20: note = C9Orf72 CTCN PAM targeting sequence
  source 1..20: mol_type = other RNA
cactcctaacagaataagaa

SEQ ID NO: 20186 - RNA, 20 nt, synthetic construct
  misc_feature 1..20: note = C9Orf72 CTCN PAM targeting sequence
  source 1..20: mol_type = other RNA
ctcctaacagaataagaaaa

SEQ ID NO: 20187 - RNA, 20 nt, synthetic construct
  misc_feature 1..20: note = C9Orf72 CTCN PAM targeting sequence
  source 1..20: mol_type = other RNA
taacagaataagaaaaaaaa

SEQ ID NO: 20188 - RNA, 20 nt, synthetic construct
  misc_feature 1..20: note = C9Orf72 CTCN PAM targeting sequence
  source 1..20: mol_type = other RNA
ttggtaggccgaggcaggtg

SEQ ID NO: 20189 - RNA, 20 nt, synthetic construct
  misc_feature 1..20: note = C9Orf72 CTCN PAM targeting sequence
  source 1..20: mol_type = other RNA
gcctaccaaagagctgggat

SEQ ID NO: 20190 - RNA, 20 nt, synthetic construct
  misc_feature 1..20: note = C9Orf72 CTCN PAM targeting sequence
  source 1..20: mol_type = other RNA
ggtgatccacctgcctcggc

SEQ ID NO: 20191 - RNA, 20 nt, synthetic construct
  misc_feature 1..20: note = C9Orf72 CTCN PAM targeting sequence
  source 1..20: mol_type = other RNA
tgacctcaggtgatccacct

SEQ ID NO: 20192 - RNA, 20 nt, synthetic construct
  misc_feature 1..20: note = C9Orf72 CTCN PAM targeting sequence
  source 1..20: mol_type = other RNA
agaccagcctggccaacatg

SEQ ID NO: 20193 - RNA, 20 nt, synthetic construct
  misc_feature 1..20: note = C9Orf72 CTCN PAM targeting sequence
  source 1..20: mol_type = other RNA
actaaaaatacaaaaaatta

SEQ ID NO: 20194 - RNA, 20 nt, synthetic construct
  misc_feature 1..20: note = C9Orf72 CTCN PAM targeting sequence
  source 1..20: mol_type = other RNA
ggaggctgaggcaggagaat

SEQ ID NO: 20195 - RNA, 20 nt, synthetic construct
  misc_feature 1..20: note = C9Orf72 CTCN PAM targeting sequence
  source 1..20: mol_type = other RNA
cgagtagctgggattacagg

SEQ ID NO: 20196 - RNA, 20 nt, synthetic construct
  misc_feature 1..20: note = C9Orf72 CTCN PAM targeting sequence
  source 1..20: mol_type = other RNA
gcctcccgagtagctgggat

SEQ ID NO: 20197 - RNA, 20 nt, synthetic construct
  misc_feature 1..20: note = C9Orf72 CTCN PAM targeting sequence
  source 1..20: mol_type = other RNA
tgcctcagcctcccgagtag

SEQ ID NO: 20198 - RNA, 20 nt, synthetic construct
  misc_feature 1..20: note = C9Orf72 CTCN PAM targeting sequence
  source 1..20: mol_type = other RNA
tgaacccggaggtggcagag

SEQ ID NO: 20199 - RNA, 20 nt, synthetic construct
  misc_feature 1..20: note = C9Orf72 CTCN PAM targeting sequence
  source 1..20: mol_type = other RNA
gggttcaagagattctcctg

SEQ ID NO: 20200 - RNA, 20 nt, synthetic construct
  misc_feature 1..20: note = C9Orf72 CTCN PAM targeting sequence
  source 1..20: mol_type = other RNA
gccacctccgggttcaagag

SEQ ID NO: 20201 - RNA, 20 nt, synthetic construct
  misc_feature 1..20: note = C9Orf72 CTCN PAM targeting sequence
  source 1..20: mol_type = other RNA
ttgcaacctctgccacctcc

SEQ ID NO: 20202 - RNA, 20 nt, synthetic construct
  misc_feature 1..20: note = C9Orf72 CTCN PAM targeting sequence
  source 1..20: mol_type = other RNA
gctcattgcaacctctgcca

SEQ ID NO: 20203 - RNA, 20 nt, synthetic construct
  misc_feature 1..20: note = C9Orf72 CTCN PAM targeting sequence
  source 1..20: mol_type = other RNA
agcctgggcgacagagagag

SEQ ID NO: 20204 - RNA, 20 nt, synthetic construct
  misc_feature 1..20: note = C9Orf72 CTCN PAM targeting sequence
  source 1..20: mol_type = other RNA
gtcgcccaggctggagtgca

SEQ ID NO: 20205 - RNA, 20 nt, synthetic construct
  misc_feature 1..20: note = C9Orf72 CTCN PAM targeting sequence
  source 1..20: mol_type = other RNA
ctgtcgcccaggctggagtg

SEQ ID NO: 20206 - RNA, 20 nt, synthetic construct
  misc_feature 1..20: note = C9Orf72 CTCN PAM targeting sequence
  source 1..20: mol_type = other RNA
ctctgtcgcccaggctggag

SEQ ID NO: 20207 - RNA, 20 nt, synthetic construct
  misc_feature 1..20: note = C9Orf72 CTCN PAM targeting sequence
  source 1..20: mol_type = other RNA
gcctcaagaaaaaaacaaac

SEQ ID NO: 20208 - RNA, 20 nt, synthetic construct
  misc_feature 1..20: note = C9Orf72 CTCN PAM targeting sequence
  source 1..20: mol_type = other RNA
agaaaaaaacaaacaaacaa

SEQ ID NO: 20209 - RNA, 20 nt, synthetic construct
  misc_feature 1..20: note = C9Orf72 CTCN PAM targeting sequence
  source 1..20: mol_type = other RNA
gtgacatttcatttcccagg

SEQ ID NO: 20210 - RNA, 20 nt, synthetic construct
  misc_feature 1..20: note = C9Orf72 CTCN PAM targeting sequence
  source 1..20: mol_type = other RNA
tgattatacttctctgtgac

SEQ ID NO: 20211 - RNA, 20 nt, synthetic construct
  misc_feature 1..20: note = C9Orf72 CTCN PAM targeting sequence
  source 1..20: mol_type = other RNA
cctgattatacttctctgtg

SEQ ID NO: 20212 - RNA, 20 nt, synthetic construct
  misc_feature 1..20: note = C9Orf72 CTCN PAM targeting sequence
  source 1..20: mol_type = other RNA
ccaaagacgatgacttcaag

SEQ ID NO: 20213 - RNA, 20 nt, synthetic construct
  misc_feature 1..20: note = C9Orf72 CTCN PAM targeting sequence
  source 1..20: mol_type = other RNA
aaaccaatagttgtttatgt

SEQ ID NO: 20214 - RNA, 20 nt, synthetic construct
  misc_feature 1..20: note = C9Orf72 CTCN PAM targeting sequence
  source 1..20: mol_type = other RNA
agagagttaccaaacattag

SEQ ID NO: 20215 - RNA, 20 nt, synthetic construct
  misc_feature 1..20: note = C9Orf72 CTCN PAM targeting sequence
  source 1..20: mol_type = other RNA
ggagtagacagcactacatg

SEQ ID NO: 20216 - RNA, 20 nt, synthetic construct
  misc_feature 1..20: note = C9Orf72 CTCN PAM targeting sequence
  source 1..20: mol_type = other RNA
ctggagtagacagcactaca

SEQ ID NO: 20217 - RNA, 20 nt, synthetic construct
  misc_feature 1..20: note = C9Orf72 CTCN PAM targeting sequence
  source 1..20: mol_type = other RNA
aaagactggctaatgtttgg

SEQ ID NO: 20218 - RNA, 20 nt, synthetic construct
  misc_feature 1..20: note = C9Orf72 CTCN PAM targeting sequence
  source 1..20: mol_type = other RNA
atttgaatcttggcttccct

SEQ ID NO: 20219 - RNA, 20 nt, synthetic construct
  misc_feature 1..20: note = C9Orf72 CTCN PAM targeting sequence
  source 1..20: mol_type = other RNA
ctcaatttgaatcttggctt

SEQ ID NO: 20220 - RNA, 20 nt, synthetic construct
  misc_feature 1..20: note = C9Orf72 CTCN PAM targeting sequence
  source 1..20: mol_type = other RNA
cagggttcatgagaggtttc

SEQ ID NO: 20221 - RNA, 20 nt, synthetic construct
  misc_feature 1..20: note = C9Orf72 CTCN PAM targeting sequence
  source 1..20: mol_type = other RNA
tgaaccctgtgagcaagcca

SEQ ID NO: 20222 - RNA, 20 nt, synthetic construct
  misc_feature 1..20: note = C9Orf72 CTCN PAM targeting sequence
  source 1..20: mol_type = other RNA
catgaaccctgtgagcaagc

SEQ ID NO: 20223 - RNA, 20 nt, synthetic construct
  misc_feature 1..20: note = C9Orf72 CTCN PAM targeting sequence
  source 1..20: mol_type = other RNA
actaacagttttagcagatg

SEQ ID NO: 20224 - RNA, 20 nt, synthetic construct
  misc_feature 1..20: note = C9Orf72 CTCN PAM targeting sequence
  source 1..20: mol_type = other RNA
aacttagcactctactaaca

SEQ ID NO: 20225 - RNA, 20 nt, synthetic construct
  misc_feature 1..20: note = C9Orf72 CTCN PAM targeting sequence
  source 1..20: mol_type = other RNA
tccctgattggtatttagaa

SEQ ID NO: 20226 - RNA, 20 nt, synthetic construct
  misc_feature 1..20: note = C9Orf72 CTCN PAM targeting sequence
  source 1..20: mol_type = other RNA
cttcttgttttttagagaca

SEQ ID NO: 20227 - RNA, 20 nt, synthetic construct
  misc_feature 1..20: note = C9Orf72 CTCN PAM targeting sequence
  source 1..20: mol_type = other RNA
aaaaaacaagaagtgagggc

SEQ ID NO: 20228 - RNA, 20 nt, synthetic construct
  misc_feature 1..20: note = C9Orf72 CTCN PAM targeting sequence
  source 1..20: mol_type = other RNA
ttttgtcatccaggctggaa

SEQ ID NO: 20229 - RNA, 20 nt, synthetic construct
  misc_feature 1..20: note = C9Orf72 CTCN PAM targeting sequence
  source 1..20: mol_type = other RNA
cggtaacttcaaactcttgg

SEQ ID NO: 20230 - RNA, 20 nt, synthetic construct
  misc_feature 1..20: note = C9Orf72 CTCN PAM targeting sequence
  source 1..20: mol_type = other RNA
gtaacttcaaactcttgggc

SEQ ID NO: 20231 - RNA, 20 nt, synthetic construct
  misc_feature 1..20: note = C9Orf72 CTCN PAM targeting sequence
  source 1..20: mol_type = other RNA
tgggctcaaatgaccctcct

SEQ ID NO: 20232 - RNA, 20 nt, synthetic construct
  misc_feature 1..20: note = C9Orf72 CTCN PAM targeting sequence
  source 1..20: mol_type = other RNA
aatgaccctcctgcctcagc

SEQ ID NO: 20233 - RNA, 20 nt, synthetic construct
  misc_feature 1..20: note = C9Orf72 CTCN PAM targeting sequence
  source 1..20: mol_type = other RNA
tgcctcagcctcccaagtag

SEQ ID NO: 20234 - RNA, 20 nt, synthetic construct
  misc_feature 1..20: note = C9Orf72 CTCN PAM targeting sequence
  source 1..20: mol_type = other RNA
gcctcccaagtagctaggac

SEQ ID NO: 20235 - RNA, 20 nt, synthetic construct
  misc_feature 1..20: note = C9Orf72 CTCN PAM targeting sequence
  source 1..20: mol_type = other RNA
caagtagctaggactacagg

SEQ ID NO: 20236 - RNA, 20 nt, synthetic construct
  misc_feature 1..20: note = C9Orf72 CTCN PAM targeting sequence
  source 1..20: mol_type = other RNA
acaaaaaattaaaaacttag

SEQ ID NO: 20237 - RNA, 20 nt, synthetic construct
  misc_feature 1..20: note = C9Orf72 CTCN PAM targeting sequence
  source 1..20: mol_type = other RNA
acctgggcaacgtagaccct

SEQ ID NO: 20238 - RNA, 20 nt, synthetic construct
  misc_feature 1..20: note = C9Orf72 CTCN PAM targeting sequence
  source 1..20: mol_type = other RNA
tggcttcaagtgatcctctt

SEQ ID NO: 20239 - RNA, 20 nt, synthetic construct
  misc_feature 1..20: note = C9Orf72 CTCN PAM targeting sequence
  source 1..20: mol_type = other RNA
tgcctccgcctcccaaagct

SEQ ID NO: 20240 - RNA, 20 nt, synthetic construct
  misc_feature 1..20: note = C9Orf72 CTCN PAM targeting sequence
  source 1..20: mol_type = other RNA
gcctcccaaagctctggcat

SEQ ID NO: 20241 - RNA, 20 nt, synthetic construct
  misc_feature 1..20: note = C9Orf72 CTCN PAM targeting sequence
  source 1..20: mol_type = other RNA
caaagctctggcattacagg

SEQ ID NO: 20242 - RNA, 20 nt, synthetic construct
  misc_feature 1..20: note = C9Orf72 CTCN PAM targeting sequence
  source 1..20: mol_type = other RNA
ggcattacaggtgtaagcca

SEQ ID NO: 20243 - RNA, 20 nt, synthetic construct
  misc_feature 1..20: note = C9Orf72 CTCN PAM targeting sequence
  source 1..20: mol_type = other RNA
aacctggctctcaatacttg

SEQ ID NO: 20244 - RNA, 20 nt, synthetic construct
  misc_feature 1..20: note = C9Orf72 CTCN PAM targeting sequence
  source 1..20: mol_type = other RNA
caatacttgtaaccatgctg

SEQ ID NO: 20245 - RNA, 20 nt, synthetic construct
  misc_feature 1..20: note = C9Orf72 CTCN PAM targeting sequence
  source 1..20: mol_type = other RNA
atacttgtaaccatgctgtt

SEQ ID NO: 20246 - RNA, 20 nt, synthetic construct
  misc_feature 1..20: note = C9Orf72 CTCN PAM targeting sequence
  source 1..20: mol_type = other RNA
cagcccaaagagaagcagga

SEQ ID NO: 20247 - RNA, 20 nt, synthetic construct
  misc_feature 1..20: note = C9Orf72 CTCN PAM targeting sequence
  source 1..20: mol_type = other RNA
ttgggctgggagaaaataaa

SEQ ID NO: 20248 - RNA, 20 nt, synthetic construct
  misc_feature 1..20: note = C9Orf72 CTCN PAM targeting sequence
  source 1..20: mol_type = other RNA
tgttgtggaaagtggacggt

SEQ ID NO: 20249 - RNA, 20 nt, synthetic construct
  misc_feature 1..20: note = C9Orf72 CTCN PAM targeting sequence
  source 1..20: mol_type = other RNA
atcttcaacatcagggaaga

SEQ ID NO: 20250 - RNA, 20 nt, synthetic construct
  misc_feature 1..20: note = C9Orf72 CTCN PAM targeting sequence
  source 1..20: mol_type = other RNA
cagttccaagtttctcagac

SEQ ID NO: 20251 - RNA, 20 nt, synthetic construct
  misc_feature 1..20: note = C9Orf72 CTCN PAM targeting sequence
  source 1..20: mol_type = other RNA
gacaataggtaggctaacct

SEQ ID NO: 20252 - RNA, 20 nt, synthetic construct
  misc_feature 1..20: note = C9Orf72 CTCN PAM targeting sequence
  source 1..20: mol_type = other RNA
tgggaactatctaattaacg

SEQ ID NO: 20253 - RNA, 20 nt, synthetic construct
  misc_feature 1..20: note = C9Orf72 CTCN PAM targeting sequence
  source 1..20: mol_type = other RNA
ggttctattctacgttaatt

SEQ ID NO: 20254 - RNA, 20 nt, synthetic construct
  misc_feature 1..20: note = C9Orf72 CTCN PAM targeting sequence
  source 1..20: mol_type = other RNA
ttggtttactttgtttctct

SEQ ID NO: 20255 - RNA, 20 nt, synthetic construct
  misc_feature 1..20: note = C9Orf72 CTCN PAM targeting sequence
  source 1..20: mol_type = other RNA
gaaagcaaattgtggagtgc

SEQ ID NO: 20256 - RNA, 20 nt, synthetic construct
  misc_feature 1..20: note = C9Orf72 CTCN PAM targeting sequence
  source 1..20: mol_type = other RNA
acaatttgctttcagagaaa

SEQ ID NO: 20257 - RNA, 20 nt, synthetic construct
  misc_feature 1..20: note = C9Orf72 CTCN PAM targeting sequence
  source 1..20: mol_type = other RNA
aggaaaaaattacaagcacc

SEQ ID NO: 20258 - RNA, 20 nt, synthetic construct
  misc_feature 1..20: note = C9Orf72 CTCN PAM targeting sequence
  source 1..20: mol_type = other RNA
cgttcttgtttcagatgtac

SEQ ID NO: 20259 - RNA, 20 nt, synthetic construct
  misc_feature 1..20: note = C9Orf72 CTCN PAM targeting sequence
  source 1..20: mol_type = other RNA
ttcttgtttcagatgtacta

SEQ ID NO: 20260 - RNA, 20 nt, synthetic construct
  misc_feature 1..20: note = C9Orf72 CTCN PAM targeting sequence
  source 1..20: mol_type = other RNA
gccaaggcctgccactttag

SEQ ID NO: 20261 - RNA, 20 nt, synthetic construct
  misc_feature 1..20: note = C9Orf72 CTCN PAM targeting sequence
  source 1..20: mol_type = other RNA
aggttattaatatcccctat

SEQ ID NO: 20262 - RNA, 20 nt, synthetic construct
  misc_feature 1..20: note = C9Orf72 CTCN PAM targeting sequence
  source 1..20: mol_type = other RNA
gactttgggaaacttttaac

SEQ ID NO: 20263 - RNA, 20 nt, synthetic construct
  misc_feature 1..20: note = C9Orf72 CTCN PAM targeting sequence
  source 1..20: mol_type = other RNA
cccagagcctaacaatctcg

SEQ ID NO: 20264 - RNA, 20 nt, synthetic construct
  misc_feature 1..20: note = C9Orf72 CTCN PAM targeting sequence
  source 1..20: mol_type = other RNA
cagagcctaacaatctcgat

SEQ ID NO: 20265 - RNA, 20 nt, synthetic construct
  misc_feature 1..20: note = C9Orf72 CTCN PAM targeting sequence
  source 1..20: mol_type = other RNA
gggagagtagttgcctggtt

SEQ ID NO: 20266 - RNA, 20 nt, synthetic construct
  misc_feature 1..20: note = C9Orf72 CTCN PAM targeting sequence
  source 1..20: mol_type = other RNA
attgcatctgaaagggccac

SEQ ID NO: 20267 - RNA, 20 nt, synthetic construct
  misc_feature 1..20: note = C9Orf72 CTCN PAM targeting sequence
  source 1..20: mol_type = other RNA
tgggaaagtgcaggacctcc

SEQ ID NO: 20268 - RNA, 20 nt, synthetic construct
  misc_feature 1..20: note = C9Orf72 CTCN PAM targeting sequence
  source 1..20: mol_type = other RNA
ctcctgtttctgaatacaaa

SEQ ID NO: 20269 - RNA, 20 nt, synthetic construct
  misc_feature 1..20: note = C9Orf72 CTCN PAM targeting sequence
  source 1..20: mol_type = other RNA
tgtttctgaatacaaagcct

SEQ ID NO: 20270 - RNA, 20 nt, synthetic construct
  misc_feature 1..20: note = C9Orf72 CTCN PAM targeting sequence
  source 1..20: mol_type = other RNA
ttgggtctatctggccgcgt

SEQ ID NO: 20271 - RNA, 20 nt, synthetic construct
  misc_feature 1..20: note = C9Orf72 CTCN PAM targeting sequence
  source 1..20: mol_type = other RNA
gagctgtgaagcaaccaggt

SEQ ID NO: 20272 - RNA, 20 nt, synthetic construct
  misc_feature 1..20: note = C9Orf72 CTCN PAM targeting sequence
  source 1..20: mol_type = other RNA
gagatgacacagacttgctt

SEQ ID NO: 20273 - RNA, 20 nt, synthetic construct
  misc_feature 1..20: note = C9Orf72 CTCN PAM targeting sequence
  source 1..20: mol_type = other RNA
ccattctgtgggacatgacc

SEQ ID NO: 20274 - RNA, 20 nt, synthetic construct
  misc_feature 1..20: note = C9Orf72 CTCN PAM targeting sequence
  source 1..20: mol_type = other RNA
tatgcaagtcatcaccactc

SEQ ID NO: 20275 - RNA, 20 nt, synthetic construct
  misc_feature 1..20: note = C9Orf72 CTCN PAM targeting sequence
  source 1..20: mol_type = other RNA
ctagaagcttgggctgaaat

SEQ ID NO: 20276 - RNA, 20 nt, synthetic construct
  misc_feature 1..20: note = C9Orf72 CTCN PAM targeting sequence
  source 1..20: mol_type = other RNA
agaagcttgggctgaaattg

SEQ ID NO: 20277 - RNA, 20 nt, synthetic construct
  misc_feature 1..20: note = C9Orf72 CTCN PAM targeting sequence
  source 1..20: mol_type = other RNA
acacccccatctcatcccgc

SEQ ID NO: 20278 - RNA, 20 nt, synthetic construct
  misc_feature 1..20: note = C9Orf72 CTCN PAM targeting sequence
  source 1..20: mol_type = other RNA
tcccgcatgatctcctcgcc

SEQ ID NO: 20279 - RNA, 20 nt, synthetic construct
  misc_feature 1..20: note = C9Orf72 CTCN PAM targeting sequence
  source 1..20: mol_type = other RNA
tcgccggcagggaccgtctc

SEQ ID NO: 20280 - RNA, 20 nt, synthetic construct
  misc_feature 1..20: note = C9Orf72 CTCN PAM targeting sequence
  source 1..20: mol_type = other RNA
ccggcagggaccgtctcggg

SEQ ID NO: 20281 - RNA, 20 nt, synthetic construct
  misc_feature 1..20: note = C9Orf72 CTCN PAM targeting sequence
  source 1..20: mol_type = other RNA
ggttcctagcgaaccccgac

SEQ ID NO: 20282 - RNA, 20 nt, synthetic construct
  misc_feature 1..20: note = C9Orf72 CTCN PAM targeting sequence
  source 1..20: mol_type = other RNA
ggccttcccccaggcgaggc

SEQ ID NO: 20283 - RNA, 20 nt, synthetic construct
  misc_feature 1..20: note = C9Orf72 CTCN PAM targeting sequence
  source 1..20: mol_type = other RNA
cctgggggaaggccggaggg

SEQ ID NO: 20284 - RNA, 20 nt, synthetic construct
  misc_feature 1..20: note = C9Orf72 CTCN PAM targeting sequence
  source 1..20: mol_type = other RNA
cagtacccgaggctcccttt

SEQ ID NO: 20285 - RNA, 20 nt, synthetic construct
  misc_feature 1..20: note = C9Orf72 CTCN PAM targeting sequence
  source 1..20: mol_type = other RNA
gtacccgaggctcccttttc

SEQ ID NO: 20286 - RNA, 20 nt, synthetic construct
  misc_feature 1..20: note = C9Orf72 CTCN PAM targeting sequence
  source 1..20: mol_type = other RNA
ggtactgagaggcctcgcct

SEQ ID NO: 20287 - RNA, 20 nt, synthetic construct
  misc_feature 1..20: note = C9Orf72 CTCN PAM targeting sequence
  source 1..20: mol_type = other RNA
cttttctcgagcccgcagcg

SEQ ID NO: 20288 - RNA, 20 nt, synthetic construct
  misc_feature 1..20: note = C9Orf72 CTCN PAM targeting sequence
  source 1..20: mol_type = other RNA
agcccgcagcggcagcgctc

SEQ ID NO: 20289 - RNA, 20 nt, synthetic construct
  misc_feature 1..20: note = C9Orf72 CTCN PAM targeting sequence
  source 1..20: mol_type = other RNA
agaaaagggagcctcgggta

SEQ ID NO: 20290 - RNA, 20 nt, synthetic construct
  misc_feature 1..20: note = C9Orf72 CTCN PAM targeting sequence
  source 1..20: mol_type = other RNA
cagcgggtccccgggaagga

SEQ ID NO: 20291 - RNA, 20 nt, synthetic construct
  misc_feature 1..20: note = C9Orf72 CTCN PAM targeting sequence
  source 1..20: mol_type = other RNA
ttcccggggacccgctggga

SEQ ID NO: 20292 - RNA, 20 nt, synthetic construct
  misc_feature 1..20: note = C9Orf72 CTCN PAM targeting sequence
  source 1..20: mol_type = other RNA
ggtactgagggcgggaaagc

SEQ ID NO: 20293 - RNA, 20 nt, synthetic construct
  misc_feature 1..20: note = C9Orf72 CTCN PAM targeting sequence
  source 1..20: mol_type = other RNA
gtacccgagctgtctccttc

SEQ ID NO: 20294 - RNA, 20 nt, synthetic construct
  misc_feature 1..20: note = C9Orf72 CTCN PAM targeting sequence
  source 1..20: mol_type = other RNA
tccttgctttcccgccctca

SEQ ID NO: 20295 - RNA, 20 nt, synthetic construct
  misc_feature 1..20: note = C9Orf72 CTCN PAM targeting sequence
  source 1..20: mol_type = other RNA
agcgactggtggaattgcct

SEQ ID NO: 20296 - RNA, 20 nt, synthetic construct
  misc_feature 1..20: note = C9Orf72 CTCN PAM targeting sequence
  source 1..20: mol_type = other RNA
gaccgaagctgggtgtcggg

SEQ ID NO: 20297 - RNA, 20 nt, synthetic construct
  misc_feature 1..20: note = C9Orf72 CTCN PAM targeting sequence
  source 1..20: mol_type = other RNA
tttctctgaccgaagctggg

SEQ ID NO: 20298 - RNA, 20 nt, synthetic construct
  misc_feature 1..20: note = C9Orf72 CTCN PAM targeting sequence
  source 1..20: mol_type = other RNA
catttctctgaccgaagctg

SEQ ID NO: 20299 - RNA, 20 nt, synthetic construct
  misc_feature 1..20: note = C9Orf72 CTCN PAM targeting sequence
  source 1..20: mol_type = other RNA
acgcatttttactttccctc

SEQ ID NO: 20300 - RNA, 20 nt, synthetic construct
  misc_feature 1..20: note = C9Orf72 CTCN PAM targeting sequence
  source 1..20: mol_type = other RNA
gaggagagcccccgcttcta

SEQ ID NO: 20301 - RNA, 20 nt, synthetic construct
  misc_feature 1..20: note = C9Orf72 CTCN PAM targeting sequence
  source 1..20: mol_type = other RNA
gagctcgacgcatttttact

SEQ ID NO: 20302 - RNA, 20 nt, synthetic construct
  misc_feature 1..20: note = C9Orf72 CTCN PAM targeting sequence
  source 1..20: mol_type = other RNA
tcagagctcgacgcattttt

SEQ ID NO: 20303 - RNA, 20 nt, synthetic construct
  misc_feature 1..20: note = C9Orf72 CTCN PAM targeting sequence
  source 1..20: mol_type = other RNA
cctcagagctcgacgcattt

SEQ ID NO: 20304 - RNA, 20 nt, synthetic construct
  misc_feature 1..20: note = C9Orf72 CTCN PAM targeting sequence
  source 1..20: mol_type = other RNA
tcccggcagccgaaccccaa

SEQ ID NO: 20305 - RNA, 20 nt, synthetic construct
  misc_feature 1..20: note = C9Orf72 CTCN PAM targeting sequence
  source 1..20: mol_type = other RNA
tcactcacccactcgccacc

SEQ ID NO: 20306 - RNA, 20 nt, synthetic construct
  misc_feature 1..20: note = C9Orf72 CTCN PAM targeting sequence
  source 1..20: mol_type = other RNA
ctcacccactcgccaccgcc

SEQ ID NO: 20307 - RNA, 20 nt, synthetic construct
  misc_feature 1..20: note = C9Orf72 CTCN PAM targeting sequence
  source 1..20: mol_type = other RNA
cccactcgccaccgcctgcg

SEQ ID NO: 20308 - RNA, 20 nt, synthetic construct
  misc_feature 1..20: note = C9Orf72 CTCN PAM targeting sequence
  source 1..20: mol_type = other RNA
ccaccgcctgcgcctccgcc

SEQ ID NO: 20309 - RNA, 20 nt, synthetic construct
  misc_feature 1..20: note = C9Orf72 CTCN PAM targeting sequence
  source 1..20: mol_type = other RNA
gccgccgcgggcgcaggcac

SEQ ID NO: 20310 - RNA, 20 nt, synthetic construct
  misc_feature 1..20: note = C9Orf72 CTCN PAM targeting sequence
  source 1..20: mol_type = other RNA
tgagttccagagcttgctac

SEQ ID NO: 20311 - RNA, 20 nt, synthetic construct
  misc_feature 1..20: note = C9Orf72 CTCN PAM targeting sequence
  source 1..20: mol_type = other RNA
ggagtcgcgcgctaggggcc

SEQ ID NO: 20312 - RNA, 20 nt, synthetic construct
  misc_feature 1..20: note = C9Orf72 CTCN PAM targeting sequence
  source 1..20: mol_type = other RNA
ggaactcaggagtcgcgcgc

SEQ ID NO: 20313 - RNA, 20 nt, synthetic construct
  misc_feature 1..20: note = C9Orf72 CTCN PAM targeting sequence
  source 1..20: mol_type = other RNA
ttgttttcttctggttaatc

SEQ ID NO: 20314 - RNA, 20 nt, synthetic construct
  misc_feature 1..20: note = C9Orf72 CTCN PAM targeting sequence
  source 1..20: mol_type = other RNA
gcgagtactgtgagagcaag

SEQ ID NO: 20315 - RNA, 20 nt, synthetic construct
  misc_feature 1..20: note = C9Orf72 CTCN PAM targeting sequence
  source 1..20: mol_type = other RNA
ctgagggtgaacaagaaaag

SEQ ID NO: 20316 - RNA, 20 nt, synthetic construct
  misc_feature 1..20: note = C9Orf72 CTCN PAM targeting sequence
  source 1..20: mol_type = other RNA
cagtactcgctgagggtgaa

SEQ ID NO: 20317 - RNA, 20 nt, synthetic construct
  misc_feature 1..20: note = C9Orf72 CTCN PAM targeting sequence
  source 1..20: mol_type = other RNA
cacagtactcgctgagggtg

SEQ ID NO: 20318 - RNA, 20 nt, synthetic construct
  misc_feature 1..20: note = C9Orf72 CTCN PAM targeting sequence
  source 1..20: mol_type = other RNA
ccactacttgctctcacagt

SEQ ID NO: 20319 - RNA, 20 nt, synthetic construct
  misc_feature 1..20: note = C9Orf72 CTCN PAM targeting sequence
  source 1..20: mol_type = other RNA
ccccactacttgctctcaca

SEQ ID NO: 20320 - RNA, 20 nt, synthetic construct
  misc_feature 1..20: note = C9Orf72 CTCN PAM targeting sequence
  source 1..20: mol_type = other RNA
ctccccactacttgctctca

SEQ ID NO: 20321 - RNA, 20 nt, synthetic construct
  misc_feature 1..20: note = C9Orf72 CTCN PAM targeting sequence
  source 1..20: mol_type = other RNA
taaacccacacctgctcttg

SEQ ID NO: 20322 - RNA, 20 nt, synthetic construct
  misc_feature 1..20: note = C9Orf72 CTCN PAM targeting sequence
  source 1..20: mol_type = other RNA
tgctagaccccgcccccaaa

SEQ ID NO: 20323 - RNA, 20 nt, synthetic construct
  misc_feature 1..20: note = C9Orf72 CTCN PAM targeting sequence
  source 1..20: mol_type = other RNA
tttgggggcggggtctagca

SEQ ID NO: 20324 - RNA, 20 nt, synthetic construct
  misc_feature 1..20: note = C9Orf72 CTCN PAM targeting sequence
  source 1..20: mol_type = other RNA
ctttcctagcgggacaccgt

SEQ ID NO: 20325 - RNA, 20 nt, synthetic construct
  misc_feature 1..20: note = C9Orf72 CTCN PAM targeting sequence
  source 1..20: mol_type = other RNA
ttcctagcgggacaccgtag

SEQ ID NO: 20326 - RNA, 20 nt, synthetic construct
  misc_feature 1..20: note = C9Orf72 CTCN PAM targeting sequence
  source 1..20: mol_type = other RNA
cgaggctagcgaaatggggc

SEQ ID NO: 20327 - RNA, 20 nt, synthetic construct
  misc_feature 1..20: note = C9Orf72 CTCN PAM targeting sequence
  source 1..20: mol_type = other RNA
tgagaaaacgtcatcgcaca

SEQ ID NO: 20328 - RNA, 20 nt, synthetic construct
  misc_feature 1..20: note = C9Orf72 CTCN PAM targeting sequence
  source 1..20: mol_type = other RNA
ggaggagcgttggcgcaata

SEQ ID NO: 20329 - RNA, 20 nt, synthetic construct
  misc_feature 1..20: note = C9Orf72 CTCN PAM targeting sequence
  source 1..20: mol_type = other RNA
agagcgggtcttaagataaa

SEQ ID NO: 20330 - RNA, 20 nt, synthetic construct
  misc_feature 1..20: note = C9Orf72 CTCN PAM targeting sequence
  source 1..20: mol_type = other RNA
tccagagcgggtcttaagat

SEQ ID NO: 20331 - RNA, 20 nt, synthetic construct
  misc_feature 1..20: note = C9Orf72 CTCN PAM targeting sequence
  source 1..20: mol_type = other RNA
cctattaaggttcgcacacg

SEQ ID NO: 20332 - RNA, 20 nt, synthetic construct
  misc_feature 1..20: note = C9Orf72 CTCN PAM targeting sequence
  source 1..20: mol_type = other RNA
agatccagcagcctccccta

SEQ ID NO: 20333 - RNA, 20 nt, synthetic construct
  misc_feature 1..20: note = C9Orf72 CTCN PAM targeting sequence
  source 1..20: mol_type = other RNA
acacataattggtggatgaa

SEQ ID NO: 20334 - RNA, 20 nt, synthetic construct
  misc_feature 1..20: note = C9Orf72 CTCN PAM targeting sequence
  source 1..20: mol_type = other RNA
actgcaaaccctggtagggg

SEQ ID NO: 20335 - RNA, 20 nt, synthetic construct
  misc_feature 1..20: note = C9Orf72 CTCN PAM targeting sequence
  source 1..20: mol_type = other RNA
ggcactgcgggcgggaatcc

SEQ ID NO: 20336 - RNA, 20 nt, synthetic construct
  misc_feature 1..20: note = C9Orf72 CTCN PAM targeting sequence
  source 1..20: mol_type = other RNA
caagcatgattttcacactg

SEQ ID NO: 20337 - RNA, 20 nt, synthetic construct
  misc_feature 1..20: note = C9Orf72 CTCN PAM targeting sequence
  source 1..20: mol_type = other RNA
agcatgattttcacactggg

SEQ ID NO: 20338 - RNA, 20 nt, synthetic construct
  misc_feature 1..20: note = C9Orf72 CTCN PAM targeting sequence
  source 1..20: mol_type = other RNA
tccacatattgcaactagca

SEQ ID NO: 20339 - RNA, 20 nt, synthetic construct
  misc_feature 1..20: note = C9Orf72 CTCN PAM targeting sequence
  source 1..20: mol_type = other RNA
tctgtagtaagtggaatcta

SEQ ID NO: 20340 - RNA, 20 nt, synthetic construct
  misc_feature 1..20: note = C9Orf72 CTCN PAM targeting sequence
  source 1..20: mol_type = other RNA
gatgtgtaaaaaaacaaagg

SEQ ID NO: 20341 - RNA, 20 nt, synthetic construct
  misc_feature 1..20: note = C9Orf72 CTCN PAM targeting sequence
  source 1..20: mol_type = other RNA
cacttgcagatcaaaaggca

SEQ ID NO: 20342 - RNA, 20 nt, synthetic construct
  misc_feature 1..20: note = C9Orf72 CTCN PAM targeting sequence
  source 1..20: mol_type = other RNA
ctgtagtaagtgccatctca

SEQ ID NO: 20343 - RNA, 20 nt, synthetic construct
  misc_feature 1..20: note = C9Orf72 CTCN PAM targeting sequence
  source 1..20: mol_type = other RNA
gtgaatgattaaaacgttct

SEQ ID NO: 20344 - RNA, 20 nt, synthetic construct
  misc_feature 1..20: note = C9Orf72 CTCN PAM targeting sequence
  source 1..20: mol_type = other RNA
ctttcttcctcggtgaatga

SEQ ID NO: 20345 - RNA, 20 nt, synthetic construct
  misc_feature 1..20: note = C9Orf72 CTCN PAM targeting sequence
  source 1..20: mol_type = other RNA
caacgtctacaccttctgca

SEQ ID NO: 20346 - RNA, 20 nt, synthetic construct
  misc_feature 1..20: note = C9Orf72 CTCN PAM targeting sequence
  source 1..20: mol_type = other RNA
acgtctacaccttctgcaga

SEQ ID NO: 20347 - RNA, 20 nt, synthetic construct
  misc_feature 1..20: note = C9Orf72 CTCN PAM targeting sequence
  source 1..20: mol_type = other RNA
cacagtgtaattctctccaa

SEQ ID NO: 20348 - RNA, 20 nt, synthetic construct
  misc_feature 1..20: note = C9Orf72 CTCN PAM targeting sequence
  source 1..20: mol_type = other RNA
ccaagtccagctgctgcaac

SEQ ID NO: 20349 - RNA, 20 nt, synthetic construct
  misc_feature 1..20: note = C9Orf72 CTCN PAM targeting sequence
  source 1..20: mol_type = other RNA
aagtccagctgctgcaactg

SEQ ID NO: 20350 - RNA, 20 nt, synthetic construct
  misc_feature 1..20: note = C9Orf72 CTCN PAM targeting sequence
  source 1..20: mol_type = other RNA
ggtcacaacgggcagttgca

SEQ ID NO: 20351 - RNA, 20 nt, synthetic construct
  misc_feature 1..20: note = C9Orf72 CTCN PAM targeting sequence
  source 1..20: mol_type = other RNA
aattttatctaccaccatca

SEQ ID NO: 20352 - RNA, 20 nt, synthetic construct
  misc_feature 1..20: note = C9Orf72 CTCN PAM targeting sequence
  source 1..20: mol_type = other RNA
ccagttgaaactcaccagct

SEQ ID NO: 20353 - RNA, 20 nt, synthetic construct
  misc_feature 1..20: note = C9Orf72 CTCN PAM targeting sequence
  source 1..20: mol_type = other RNA
ccagctcctcagatccttaa

SEQ ID NO: 20354 - RNA, 20 nt, synthetic construct
  misc_feature 1..20: note = C9Orf72 CTCN PAM targeting sequence
  source 1..20: mol_type = other RNA
tcagatccttaatagtgcca

SEQ ID NO: 20355 - RNA, 20 nt, synthetic construct
  misc_feature 1..20: note = C9Orf72 CTCN PAM targeting sequence
  source 1..20: mol_type = other RNA
gatccttaatagtgccaatg

SEQ ID NO: 20356 - RNA, 20 nt, synthetic construct
  misc_feature 1..20: note = C9Orf72 CTCN PAM targeting sequence
  source 1..20: mol_type = other RNA
aagagcactatgtaacattt

SEQ ID NO: 20357 - RNA, 20 nt, synthetic construct
  misc_feature 1..20: note = C9Orf72 CTCN PAM targeting sequence
  source 1..20: mol_type = other RNA
ttgagaaaattcattggcac

SEQ ID NO: 20358 - RNA, 20 nt, synthetic construct
  misc_feature 1..20: note = C9Orf72 CTCN PAM targeting sequence
  source 1..20: mol_type = other RNA
tttttaacaaaacctccccc

SEQ ID NO: 20359 - RNA, 20 nt, synthetic construct
  misc_feature 1..20: note = C9Orf72 CTCN PAM targeting sequence
  source 1..20: mol_type = other RNA
cccttttctttgttgtgtgg

SEQ ID NO: 20360 - RNA, 20 nt, synthetic construct
  misc_feature 1..20: note = C9Orf72 CTCN PAM targeting sequence
  source 1..20: mol_type = other RNA
aaattaagtgatttatttgg

SEQ ID NO: 20361 - RNA, 20 nt, synthetic construct
  misc_feature 1..20: note = C9Orf72 CTCN PAM targeting sequence
  source 1..20: mol_type = other RNA
gtatttttattttgactgac

SEQ ID NO: 20362 - RNA, 20 nt, synthetic construct
  misc_feature 1..20: note = C9Orf72 CTCN PAM targeting sequence
  source 1..20: mol_type = other RNA
gtgtagaaacttggtaaatg

SEQ ID NO: 20363 - RNA, 20 nt, synthetic construct
  misc_feature 1..20: note = C9Orf72 CTCN PAM targeting sequence
  source 1..20: mol_type = other RNA
gtttctataaattcagttgt

SEQ ID NO: 20364 - RNA, 20 nt, synthetic construct
  misc_feature 1..20: note = C9Orf72 CTCN PAM targeting sequence
  source 1..20: mol_type = other RNA
agatgtattagacgtaactg

SEQ ID NO: 20365 - RNA, 20 nt, synthetic construct
  misc_feature 1..20: note = C9Orf72 CTCN PAM targeting sequence
  source 1..20: mol_type = other RNA
tgttgtacattaaatctcta

SEQ ID NO: 20366 - RNA, 20 nt, synthetic construct
  misc_feature 1..20: note = C9Orf72 CTCN PAM targeting sequence
  source 1..20: mol_type = other RNA
cagttctgcaggctgtacaa

SEQ ID NO: 20367 - RNA, 20 nt, synthetic construct
  misc_feature 1..20: note = C9Orf72 CTCN PAM targeting sequence
  source 1..20: mol_type = other RNA
ctatgccttccatcatgatt

SEQ ID NO: 20368 - RNA, 20 nt, synthetic construct
  misc_feature 1..20: note = C9Orf72 CTCN PAM targeting sequence
  source 1..20: mol_type = other RNA
tcccccagttcctgccatgt

SEQ ID NO: 20369 - RNA, 20 nt, synthetic construct
  misc_feature 1..20: note = C9Orf72 CTCN PAM targeting sequence
  source 1..20: mol_type = other RNA
cttcccccagttcctgccat

SEQ ID NO: 20370 - RNA, 20 nt, synthetic construct
  misc_feature 1..20: note = C9Orf72 CTCN PAM targeting sequence
  source 1..20: mol_type = other RNA
catttctctcttcccccagt

SEQ ID NO: 20371 - RNA, 20 nt, synthetic construct
  misc_feature 1..20: note = C9Orf72 CTCN PAM targeting sequence
  source 1..20: mol_type = other RNA
ctatatagtaccaagagggg

SEQ ID NO: 20372 - RNA, 20 nt, synthetic construct
  misc_feature 1..20: note = C9Orf72 CTCN PAM targeting sequence
  source 1..20: mol_type = other RNA
tggtactatatagtgagttc

SEQ ID NO: 20373 - RNA, 20 nt, synthetic construct
  misc_feature 1..20: note = C9Orf72 CTCN PAM targeting sequence
  source 1..20: mol_type = other RNA
cctcccaccaggcccaacct

SEQ ID NO: 20374 - RNA, 20 nt, synthetic construct
  misc_feature 1..20: note = C9Orf72 CTCN PAM targeting sequence
  source 1..20: mol_type = other RNA
caccaggcccaacctccaac

SEQ ID NO: 20375 - RNA, 20 nt, synthetic construct
  misc_feature 1..20: note = C9Orf72 CTCN PAM targeting sequence
  source 1..20: mol_type = other RNA
aacactggggattacagttg

SEQ ID NO: 20376 - RNA, 20 nt, synthetic construct
  misc_feature 1..20: note = C9Orf72 CTCN PAM targeting sequence
  source 1..20: mol_type = other RNA
tgttcaactgtaatccccag

SEQ ID NO: 20377 - RNA, 20 nt, synthetic construct
  misc_feature 1..20: note = C9Orf72 CTCN PAM targeting sequence
  source 1..20: mol_type = other RNA
gtccccacccaaatctcatg

SEQ ID NO: 20378 - RNA, 20 nt, synthetic construct
  misc_feature 1..20: note = C9Orf72 CTCN PAM targeting sequence
  source 1..20: mol_type = other RNA
ggcccctcccaaatctaatg

SEQ ID NO: 20379 - RNA, 20 nt, synthetic construct
  misc_feature 1..20: note = C9Orf72 CTCN PAM targeting sequence
  source 1..20: mol_type = other RNA
caaatctaatgtccttctca

SEQ ID NO: 20380 - RNA, 20 nt, synthetic construct
  misc_feature 1..20: note = C9Orf72 CTCN PAM targeting sequence
  source 1..20: mol_type = other RNA
tattgcaaaatactgtcgtg

SEQ ID NO: 20381 - RNA, 20 nt, synthetic construct
  misc_feature 1..20: note = C9Orf72 CTCN PAM targeting sequence
  source 1..20: mol_type = other RNA
atccagcattcattcaaaag

SEQ ID NO: 20382 - RNA, 20 nt, synthetic construct
  misc_feature 1..20: note = C9Orf72 CTCN PAM targeting sequence
  source 1..20: mol_type = other RNA
cctgagacgaagctagtccc

SEQ ID NO: 20383 - RNA, 20 nt, synthetic construct
  misc_feature 1..20: note = C9Orf72 CTCN PAM targeting sequence
  source 1..20: mol_type = other RNA
ggtgagacttgggactttgg

SEQ ID NO: 20384 - RNA, 20 nt, synthetic construct
  misc_feature 1..20: note = C9Orf72 CTCN PAM targeting sequence
  source 1..20: mol_type = other RNA
ctttcggaatggcagtatct

SEQ ID NO: 20385 - RNA, 20 nt, synthetic construct
  misc_feature 1..20: note = C9Orf72 CTCN PAM targeting sequence
  source 1..20: mol_type = other RNA
ttcttttggcagatttctcc

SEQ ID NO: 20386 - RNA, 20 nt, synthetic construct
  misc_feature 1..20: note = C9Orf72 CTCN PAM targeting sequence
  source 1..20: mol_type = other RNA
gaaataatctcctttgactc

SEQ ID NO: 20387 - RNA, 20 nt, synthetic construct
  misc_feature 1..20: note = C9Orf72 CTCN PAM targeting sequence
  source 1..20: mol_type = other RNA
tttgactcacacccagggaa

SEQ ID NO: 20388 - RNA, 20 nt, synthetic construct
  misc_feature 1..20: note = C9Orf72 CTCN PAM targeting sequence
  source 1..20: mol_type = other RNA
cacccagggaacactgatgc

SEQ ID NO: 20389 - RNA, 20 nt, synthetic construct
  misc_feature 1..20: note = C9Orf72 CTCN PAM targeting sequence
  source 1..20: mol_type = other RNA
ttgcatcagtgttccctggg

SEQ ID NO: 20390 - RNA, 20 nt, synthetic construct
  misc_feature 1..20: note = C9Orf72 CTCN PAM targeting sequence
  source 1..20: mol_type = other RNA
caaaaccttgggcagaacca

SEQ ID NO: 20391 - RNA, 20 nt, synthetic construct
  misc_feature 1..20: note = C9Orf72 CTCN PAM targeting sequence
  source 1..20: mol_type = other RNA
cacagctgctctcatgggct

SEQ ID NO: 20392 - RNA, 20 nt, synthetic construct
  misc_feature 1..20: note = C9Orf72 CTCN PAM targeting sequence
  source 1..20: mol_type = other RNA
catgggctagcattgagtgc

SEQ ID NO: 20393 - RNA, 20 nt, synthetic construct
  misc_feature 1..20: note = C9Orf72 CTCN PAM targeting sequence
  source 1..20: mol_type = other RNA
tgggctagcattgagtgctt

SEQ ID NO: 20394 - RNA, 20 nt, synthetic construct
  misc_feature 1..20: note = C9Orf72 CTCN PAM targeting sequence
  source 1..20: mol_type = other RNA
atgctagcccatgagagcag

SEQ ID NO: 20395 - RNA, 20 nt, synthetic construct
  misc_feature 1..20: note = C9Orf72 CTCN PAM targeting sequence
  source 1..20: mol_type = other RNA
agaccccagaatggtagatc

SEQ ID NO: 20396 - RNA, 20 nt, synthetic construct
  misc_feature 1..20: note = C9Orf72 CTCN PAM targeting sequence
  source 1..20: mol_type = other RNA
gctaggcagtgccccagggg

SEQ ID NO: 20397 - RNA, 20 nt, synthetic construct
  misc_feature 1..20: note = C9Orf72 CTCN PAM targeting sequence
  source 1..20: mol_type = other RNA
ctgtgggggctgcaacccca

SEQ ID NO: 20398 - RNA, 20 nt, synthetic construct
  misc_feature 1..20: note = C9Orf72 CTCN PAM targeting sequence
  source 1..20: mol_type = other RNA
gtgggggctgcaaccccaca

SEQ ID NO: 20399 - RNA, 20 nt, synthetic construct
  misc_feature 1..20: note = C9Orf72 CTCN PAM targeting sequence
  source 1..20: mol_type = other RNA
ttgcttccctagtagatgtt

SEQ ID NO: 20400 - RNA, 20 nt, synthetic construct
  misc_feature 1..20: note = C9Orf72 CTCN PAM targeting sequence
  source 1..20: mol_type = other RNA
atgaggattccaccccagta

SEQ ID NO: 20401 - RNA, 20 nt, synthetic construct
  misc_feature 1..20: note = C9Orf72 CTCN PAM targeting sequence
  source 1..20: mol_type = other RNA
tggagaacatctactaggga

SEQ ID NO: 20402 - RNA, 20 nt, synthetic construct
  misc_feature 1..20: note = C9Orf72 CTCN PAM targeting sequence
  source 1..20: mol_type = other RNA
aaaatctaggcagagcttct

SEQ ID NO: 20403 - RNA, 20 nt, synthetic construct
  misc_feature 1..20: note = C9Orf72 CTCN PAM targeting sequence
  source 1..20: mol_type = other RNA
gcctagattttagaggatgt

SEQ ID NO: 20404 - RNA, 20 nt, synthetic construct
  misc_feature 1..20: note = C9Orf72 CTCN PAM targeting sequence
  source 1..20: mol_type = other RNA
actcttgcattatgtgcgcc

SEQ ID NO: 20405 - RNA, 20 nt, synthetic construct
  misc_feature 1..20: note = C9Orf72 CTCN PAM targeting sequence
  source 1..20: mol_type = other RNA
tgcattatgtgcgcccgccg

SEQ ID NO: 20406 - RNA, 20 nt, synthetic construct
  misc_feature 1..20: note = C9Orf72 CTCN PAM targeting sequence
  source 1..20: mol_type = other RNA
gataactttcaccagtaaga

SEQ ID NO: 20407 - RNA, 20 nt, synthetic construct
  misc_feature 1..20: note = C9Orf72 CTCN PAM targeting sequence
  source 1..20: mol_type = other RNA
attcttgcctcctcagaaga

SEQ ID NO: 20408 - RNA, 20 nt, synthetic construct
  misc_feature 1..20: note = C9Orf72 CTCN PAM targeting sequence
  source 1..20: mol_type = other RNA
tcagaagaaagaatttgacc

SEQ ID NO: 20409 - RNA, 20 nt, synthetic construct
  misc_feature 1..20: note = C9Orf72 CTCN PAM targeting sequence
  source 1..20: mol_type = other RNA
gaagaaagaatttgaccaag

SEQ ID NO: 20410 - RNA, 20 nt, synthetic construct
  misc_feature 1..20: note = C9Orf72 CTCN PAM targeting sequence
  source 1..20: mol_type = other RNA
tggtcaaattctttcttctg

SEQ ID NO: 20411 - RNA, 20 nt, synthetic construct
  misc_feature 1..20: note = C9Orf72 CTCN PAM targeting sequence
  source 1..20: mol_type = other RNA
ttttctgccttatgcctctt

SEQ ID NO: 20412 - RNA, 20 nt, synthetic construct
  misc_feature 1..20: note = C9Orf72 CTCN PAM targeting sequence
  source 1..20: mol_type = other RNA
gaaacttgtcgcagtctctt

SEQ ID NO: 20413 - RNA, 20 nt, synthetic construct
  misc_feature 1..20: note = C9Orf72 CTCN PAM targeting sequence
  source 1..20: mol_type = other RNA
tgctctgaaacttgtcgcag

SEQ ID NO: 20414 - RNA, 20 nt, synthetic construct
  misc_feature 1..20: note = C9Orf72 CTCN PAM targeting sequence
  source 1..20: mol_type = other RNA
tccaaatgtactttcctttc

SEQ ID NO: 20415 - RNA, 20 nt, synthetic construct
  misc_feature 1..20: note = C9Orf72 CTCN PAM targeting sequence
  source 1..20: mol_type = other RNA
aaggtgcccacttgggcctc

SEQ ID NO: 20416 - RNA, 20 nt, synthetic construct
  misc_feature 1..20: note = C9Orf72 CTCN PAM targeting sequence
  source 1..20: mol_type = other RNA
cccttagggaaggaccaagg

SEQ ID NO: 20417 - RNA, 20 nt, synthetic construct
  misc_feature 1..20: note = C9Orf72 CTCN PAM targeting sequence
  source 1..20: mol_type = other RNA
ccttccaagtgcaagcaggg

SEQ ID NO: 20418 - RNA, 20 nt, synthetic construct
  misc_feature 1..20: note = C9Orf72 CTCN PAM targeting sequence
  source 1..20: mol_type = other RNA
agtaaacacactgcacacgc

SEQ ID NO: 20419 - RNA, 20 nt, synthetic construct
  misc_feature 1..20: note = C9Orf72 CTCN PAM targeting sequence
  source 1..20: mol_type = other RNA
ggtaagcatgtatacaactc

SEQ ID NO: 20420 - RNA, 20 nt, synthetic construct
  misc_feature 1..20: note = C9Orf72 CTCN PAM targeting sequence
  source 1..20: mol_type = other RNA
taatgtgcatgttaagccca

SEQ ID NO: 20421 - RNA, 20 nt, synthetic construct
  misc_feature 1..20: note = C9Orf72 CTCN PAM targeting sequence
  source 1..20: mol_type = other RNA
ctcagttcctgagatcttat

SEQ ID NO: 20422 - RNA, 20 nt, synthetic construct
  misc_feature 1..20: note = C9Orf72 CTCN PAM targeting sequence
  source 1..20: mol_type = other RNA
cagttcctgagatcttattg

SEQ ID NO: 20423 - RNA, 20 nt, synthetic construct
  misc_feature 1..20: note = C9Orf72 CTCN PAM targeting sequence
  source 1..20: mol_type = other RNA
gttcctgagatcttattgga

SEQ ID NO: 20424 - RNA, 20 nt, synthetic construct
  misc_feature 1..20: note = C9Orf72 CTCN PAM targeting sequence
  source 1..20: mol_type = other RNA
ggaactgagagagtgggctt

SEQ ID NO: 20425 - RNA, 20 nt, synthetic construct
  misc_feature 1..20: note = C9Orf72 CTCN PAM targeting sequence
  source 1..20: mol_type = other RNA
atagatagaaacacctgaaa

SEQ ID NO: 20426 - RNA, 20 nt, synthetic construct
  misc_feature 1..20: note = C9Orf72 CTCN PAM targeting sequence
  source 1..20: mol_type = other RNA
ccctggtgctggctgcaacc

SEQ ID NO: 20427 - RNA, 20 nt, synthetic construct
  misc_feature 1..20: note = C9Orf72 CTCN PAM targeting sequence
  source 1..20: mol_type = other RNA
ctggtgctggctgcaaccaa

SEQ ID NO: 20428 - RNA, 20 nt, synthetic construct
  misc_feature 1..20: note = C9Orf72 CTCN PAM targeting sequence
  source 1..20: mol_type = other RNA
aaaatagtaattggttgcag

SEQ ID NO: 20429 - RNA, 20 nt, synthetic construct
  misc_feature 1..20: note = C9Orf72 CTCN PAM targeting sequence
  source 1..20: mol_type = other RNA
ctaaaatagtaattggttgc

SEQ ID NO: 20430 - RNA, 20 nt, synthetic construct
  misc_feature 1..20: note = C9Orf72 CTCN PAM targeting sequence
  source 1..20: mol_type = other RNA
cttaccccactcatgcctga

SEQ ID NO: 20431 - RNA, 20 nt, synthetic construct
  misc_feature 1..20: note = C9Orf72 CTCN PAM targeting sequence
  source 1..20: mol_type = other RNA
taccccactcatgcctgatt

SEQ ID NO: 20432 - RNA, 20 nt, synthetic construct
  misc_feature 1..20: note = C9Orf72 CTCN PAM targeting sequence
  source 1..20: mol_type = other RNA
tgcctgattagctacctact

SEQ ID NO: 20433 - RNA, 20 nt, synthetic construct
  misc_feature 1..20: note = C9Orf72 CTCN PAM targeting sequence
  source 1..20: mol_type = other RNA
aaggggcccaggtactgtta

SEQ ID NO: 20434 - RNA, 20 nt, synthetic construct
  misc_feature 1..20: note = C9Orf72 CTCN PAM targeting sequence
  source 1..20: mol_type = other RNA
ctgaatcccagctgctcaaa

SEQ ID NO: 20435 - RNA, 20 nt, synthetic construct
  misc_feature 1..20: note = C9Orf72 CTCN PAM targeting sequence
  source 1..20: mol_type = other RNA
gctccctgaatcccagctgc

SEQ ID NO: 20436 - RNA, 20 nt, synthetic construct
  misc_feature 1..20: note = C9Orf72 CTCN PAM targeting sequence
  source 1..20: mol_type = other RNA
tacagccttgggactctgct

SEQ ID NO: 20437 - RNA, 20 nt, synthetic construct
  misc_feature 1..20: note = C9Orf72 CTCN PAM targeting sequence
  source 1..20: mol_type = other RNA
ctcttacagccttgggactc

SEQ ID NO: 20438 - RNA, 20 nt, synthetic construct
  misc_feature 1..20: note = C9Orf72 CTCN PAM targeting sequence
  source 1..20: mol_type = other RNA
taggcctcggggcctgtgat

SEQ ID NO: 20439 - RNA, 20 nt, synthetic construct
  misc_feature 1..20: note = C9Orf72 CTCN PAM targeting sequence
  source 1..20: mol_type = other RNA
gggcctgtgatgagagggac

SEQ ID NO: 20440 - RNA, 20 nt, synthetic construct
  misc_feature 1..20: note = C9Orf72 CTCN PAM targeting sequence
  source 1..20: mol_type = other RNA
tcacaggccccgaggcctag

SEQ ID NO: 20441 - RNA, 20 nt, synthetic construct
  misc_feature 1..20: note = C9Orf72 CTCN PAM targeting sequence
  source 1..20: mol_type = other RNA
catcacaggccccgaggcct

SEQ ID NO: 20442 - RNA, 20 nt, synthetic construct
  misc_feature 1..20: note = C9Orf72 CTCN PAM targeting sequence
  source 1..20: mol_type = other RNA
gggatctagaactagaaata

SEQ ID NO: 20443 - RNA, 20 nt, synthetic construct
  misc_feature 1..20: note = C9Orf72 CTCN PAM targeting sequence
  source 1..20: mol_type = other RNA
tcattttttatggctgcata

SEQ ID NO: 20444 - RNA, 20 nt, synthetic construct
  misc_feature 1..20: note = C9Orf72 CTCN PAM targeting sequence
  source 1..20: mol_type = other RNA
gtaaactattgcaaggtcaa

SEQ ID NO: 20445 - RNA, 20 nt, synthetic construct
  misc_feature 1..20: note = C9Orf72 CTCN PAM targeting sequence
  source 1..20: mol_type = other RNA
ctcataggtgggaattgaac

SEQ ID NO: 20446 - RNA, 20 nt, synthetic construct
  misc_feature 1..20: note = C9Orf72 CTCN PAM targeting sequence
  source 1..20: mol_type = other RNA
taggtgggaattgaacaatg

SEQ ID NO: 20447 - RNA, 20 nt, synthetic construct
  misc_feature 1..20: note = C9Orf72 CTCN PAM targeting sequence
  source 1..20: mol_type = other RNA
ttgttcaattcccacctatg

SEQ ID NO: 20448 - RNA, 20 nt, synthetic construct
  misc_feature 1..20: note = C9Orf72 CTCN PAM targeting sequence
  source 1..20: mol_type = other RNA
ggggactgttgtggggtggg

SEQ ID NO: 20449 - RNA, 20 nt, synthetic construct
  misc_feature 1..20: note = C9Orf72 CTCN PAM targeting sequence
  source 1..20: mol_type = other RNA
cccaccccacaacagtcccc

SEQ ID NO: 20450 - RNA, 20 nt, synthetic construct
  misc_feature 1..20: note = C9Orf72 CTCN PAM targeting sequence
  source 1..20: mol_type = other RNA
cccctcccccaccccacaac

SEQ ID NO: 20451 - RNA, 20 nt, synthetic construct
  misc_feature 1..20: note = C9Orf72 CTCN PAM targeting sequence
  source 1..20: mol_type = other RNA
taatgctatccctcccccct

SEQ ID NO: 20452 - RNA, 20 nt, synthetic construct
  misc_feature 1..20: note = C9Orf72 CTCN PAM targeting sequence
  source 1..20: mol_type = other RNA
tcatttagcattaggtatat

SEQ ID NO: 20453 - RNA, 20 nt, synthetic construct
  misc_feature 1..20: note = C9Orf72 CTCN PAM targeting sequence
  source 1..20: mol_type = other RNA
taggactaacaggcatttta

SEQ ID NO: 20454 - RNA, 20 nt, synthetic construct
  misc_feature 1..20: note = C9Orf72 CTCN PAM targeting sequence
  source 1..20: mol_type = other RNA
ccattgttttggttatcagc

SEQ ID NO: 20455 - RNA, 20 nt, synthetic construct
  misc_feature 1..20: note = C9Orf72 CTCN PAM targeting sequence
  source 1..20: mol_type = other RNA
cctgagaacgagcttttctt

SEQ ID NO: 20456 - RNA, 20 nt, synthetic construct
  misc_feature 1..20: note = C9Orf72 CTCN PAM targeting sequence
  source 1..20: mol_type = other RNA
tgagaacgagcttttcttta

SEQ ID NO: 20457 - RNA, 20 nt, synthetic construct
  misc_feature 1..20: note = C9Orf72 CTCN PAM targeting sequence
  source 1..20: mol_type = other RNA
ggagaggaagtcaagcaggc

SEQ ID NO: 20458 - RNA, 20 nt, synthetic construct
  misc_feature 1..20: note = C9Orf72 CTCN PAM targeting sequence
  source 1..20: mol_type = other RNA
ttctcaggagaggaagtcaa

SEQ ID NO: 20459 - RNA, 20 nt, synthetic construct
  misc_feature 1..20: note = C9Orf72 CTCN PAM targeting sequence
  source 1..20: mol_type = other RNA
gcttcccttttaagtgtaag

SEQ ID NO: 20460 - RNA, 20 nt, synthetic construct
  misc_feature 1..20: note = C9Orf72 CTCN PAM targeting sequence
  source 1..20: mol_type = other RNA
tgcctatgagcataggctat

SEQ ID NO: 20461 - RNA, 20 nt, synthetic construct
  misc_feature 1..20: note = C9Orf72 CTCN PAM targeting sequence
  source 1..20: mol_type = other RNA
taggcatgagcacagaaatg

SEQ ID NO: 20462 - RNA, 20 nt, synthetic construct
  misc_feature 1..20: note = C9Orf72 CTCN PAM targeting sequence
  source 1..20: mol_type = other RNA
gctgcttagaaatttcttct

SEQ ID NO: 20463 - RNA, 20 nt, synthetic construct
  misc_feature 1..20: note = C9Orf72 CTCN PAM targeting sequence
  source 1..20: mol_type = other RNA
gttctagggatctgtgaaat

SEQ ID NO: 20464 - RNA, 20 nt, synthetic construct
  misc_feature 1..20: note = C9Orf72 CTCN PAM targeting sequence
  source 1..20: mol_type = other RNA
ttgctaaagcatagcaaacc

SEQ ID NO: 20465 - RNA, 20 nt, synthetic construct
  misc_feature 1..20: note = C9Orf72 CTCN PAM targeting sequence
  source 1..20: mol_type = other RNA
ttcccaataaatttctcatt

SEQ ID NO: 20466 - RNA, 20 nt, synthetic construct
  misc_feature 1..20: note = C9Orf72 CTCN PAM targeting sequence
  source 1..20: mol_type = other RNA
tttccatctgagacctcctc

SEQ ID NO: 20467 - RNA, 20 nt, synthetic construct
  misc_feature 1..20: note = C9Orf72 CTCN PAM targeting sequence
  source 1..20: mol_type = other RNA
gatggaaatgagaaatttat

SEQ ID NO: 20468 - RNA, 20 nt, synthetic construct
  misc_feature 1..20: note = C9Orf72 CTCN PAM targeting sequence
  source 1..20: mol_type = other RNA
tcagcctggacttcactgtc

SEQ ID NO: 20469 - RNA, 20 nt, synthetic construct
  misc_feature 1..20: note = C9Orf72 CTCN PAM targeting sequence
  source 1..20: mol_type = other RNA
gcctggacttcactgtctat

SEQ ID NO: 20470 - RNA, 20 nt, synthetic construct
  misc_feature 1..20: note = C9Orf72 CTCN PAM targeting sequence
  source 1..20: mol_type = other RNA
acaagttcctagcgagttcc

SEQ ID NO: 20471 - RNA, 20 nt, synthetic construct
  misc_feature 1..20: note = C9Orf72 CTCN PAM targeting sequence
  source 1..20: mol_type = other RNA
ctaggaacttgttgagtggt

SEQ ID NO: 20472 - RNA, 20 nt, synthetic construct
  misc_feature 1..20: note = C9Orf72 CTCN PAM targeting sequence
  source 1..20: mol_type = other RNA
catctttctgtcttcttctg

SEQ ID NO: 20473 - RNA, 20 nt, synthetic construct
  misc_feature 1..20: note = C9Orf72 CTCN PAM targeting sequence
  source 1..20: mol_type = other RNA
tctttctgtcttcttctgag

SEQ ID NO: 20474 - RNA, 20 nt, synthetic construct
  misc_feature 1..20: note = C9Orf72 CTCN PAM targeting sequence
  source 1..20: mol_type = other RNA
gaagaagacagaaagatgag

SEQ ID NO: 20475 - RNA, 20 nt, synthetic construct
  misc_feature 1..20: note = C9Orf72 CTCN PAM targeting sequence
  source 1..20: mol_type = other RNA
aaaatgtttcaacttctgcc

SEQ ID NO: 20476 - RNA, 20 nt, synthetic construct
  misc_feature 1..20: note = C9Orf72 CTCN PAM targeting sequence
  source 1..20: mol_type = other RNA
gtaacaattttctgtattag

SEQ ID NO: 20477 - RNA, 20 nt, synthetic construct
  misc_feature 1..20: note = C9Orf72 CTCN PAM targeting sequence
  source 1..20: mol_type = other RNA
agtatttctttatagcaatg

SEQ ID NO: 20478 - RNA, 20 nt, synthetic construct
  misc_feature 1..20: note = C9Orf72 CTCN PAM targeting sequence
  source 1..20: mol_type = other RNA
tttctttgtaaattacccag

SEQ ID NO: 20479 - RNA, 20 nt, synthetic construct
  misc_feature 1..20: note = C9Orf72 CTCN PAM targeting sequence
  source 1..20: mol_type = other RNA
tggttctgcaggctgtatag

SEQ ID NO: 20480 - RNA, 20 nt, synthetic construct
  misc_feature 1..20: note = C9Orf72 CTCN PAM targeting sequence
  source 1..20: mol_type = other RNA
gagaacttacaatcatggcg

SEQ ID NO: 20481 - RNA, 20 nt, synthetic construct
  misc_feature 1..20: note = C9Orf72 CTCN PAM targeting sequence
  source 1..20: mol_type = other RNA
gaggcatccccagaagctga

SEQ ID NO: 20482 - RNA, 20 nt, synthetic construct
  misc_feature 1..20: note = C9Orf72 CTCN PAM targeting sequence
  source 1..20: mol_type = other RNA
ttgccttccgccatgattgt

SEQ ID NO: 20483 - RNA, 20 nt, synthetic construct
  misc_feature 1..20: note = C9Orf72 CTCN PAM targeting sequence
  source 1..20: mol_type = other RNA
ctctttgccttccgccatga

SEQ ID NO: 20484 - RNA, 20 nt, synthetic construct
  misc_feature 1..20: note = C9Orf72 CTCN PAM targeting sequence
  source 1..20: mol_type = other RNA
cgctatgtgaagtgccagct

SEQ ID NO: 20485 - RNA, 20 nt, synthetic construct
  misc_feature 1..20: note = C9Orf72 CTCN PAM targeting sequence
  source 1..20: mol_type = other RNA
tgctcccgctatgtgaagtg

SEQ ID NO: 20486 - RNA, 20 nt, synthetic construct
  misc_feature 1..20: note = C9Orf72 CTCN PAM targeting sequence
  source 1..20: mol_type = other RNA
gttcctcctgctcccgctat

SEQ ID NO: 20487 - RNA, 20 nt, synthetic construct
  misc_feature 1..20: note = C9Orf72 CTCN PAM targeting sequence
  source 1..20: mol_type = other RNA
ctgttcctcctgctcccgct

SEQ ID NO: 20488 - RNA, 20 nt, synthetic construct
  misc_feature 1..20: note = C9Orf72 CTCN PAM targeting sequence
  source 1..20: mol_type = other RNA
ctctgttcctcctgctcccg

SEQ ID NO: 20489 - RNA, 20 nt, synthetic construct
  misc_feature 1..20: note = C9Orf72 CTCN PAM targeting sequence
  source 1..20: mol_type = other RNA
cccactttccctctctctgt

SEQ ID NO: 20490 - RNA, 20 nt, synthetic construct
  misc_feature 1..20: note = C9Orf72 CTCN PAM targeting sequence
  source 1..20: mol_type = other RNA
tgagaacttactcactatac

SEQ ID NO: 20491 - RNA, 20 nt, synthetic construct
  misc_feature 1..20: note = C9Orf72 CTCN PAM targeting sequence
  source 1..20: mol_type = other RNA
cgagatctggttgtttaaaa

SEQ ID NO: 20492 - RNA, 20 nt, synthetic construct
  misc_feature 1..20: note = C9Orf72 CTCN PAM targeting sequence
  source 1..20: mol_type = other RNA
ctatacagtaccaagaaagg

SEQ ID NO: 20493 - RNA, 20 nt, synthetic construct
  misc_feature 1..20: note = C9Orf72 CTCN PAM targeting sequence
  source 1..20: mol_type = other RNA
aaccaggctccatctccaac

SEQ ID NO: 20494 - RNA, 20 nt, synthetic construct
  misc_feature 1..20: note = C9Orf72 CTCN PAM targeting sequence
  source 1..20: mol_type = other RNA
atctccaacgttggggattg

SEQ ID NO: 20495 - RNA, 20 nt, synthetic construct
  misc_feature 1..20: note = C9Orf72 CTCN PAM targeting sequence
  source 1..20: mol_type = other RNA
aacgttggggattgcaactg

SEQ ID NO: 20496 - RNA, 20 nt, synthetic construct
  misc_feature 1..20: note = C9Orf72 CTCN PAM targeting sequence
  source 1..20: mol_type = other RNA
tgttcagttgcaatccccaa

SEQ ID NO: 20497 - RNA, 20 nt, synthetic construct
  misc_feature 1..20: note = C9Orf72 CTCN PAM targeting sequence
  source 1..20: mol_type = other RNA
taccaaatttccagtataca

SEQ ID NO: 20498 - RNA, 20 nt, synthetic construct
  misc_feature 1..20: note = C9Orf72 CTCN PAM targeting sequence
  source 1..20: mol_type = other RNA
tgacatctctaggatgtaga

SEQ ID NO: 20499 - RNA, 20 nt, synthetic construct
  misc_feature 1..20: note = C9Orf72 CTCN PAM targeting sequence
  source 1..20: mol_type = other RNA
aggatgtagatattgtcatc

SEQ ID NO: 20500 - RNA, 20 nt, synthetic construct
  misc_feature 1..20: note = C9Orf72 CTCN PAM targeting sequence
  source 1..20: mol_type = other RNA
gtaaaacatatctacatcct

SEQ ID NO: 20501 - RNA, 20 nt, synthetic construct
  misc_feature 1..20: note = C9Orf72 CTCN PAM targeting sequence
  source 1..20: mol_type = other RNA
tctgtaaaacatatctacat

SEQ ID NO: 20502 - RNA, 20 nt, synthetic construct
  misc_feature 1..20: note = C9Orf72 CTCN PAM targeting sequence
  source 1..20: mol_type = other RNA
gagagcttgaattatttacc

SEQ ID NO: 20503 - RNA, 20 nt, synthetic construct
  misc_feature 1..20: note = C9Orf72 CTCN PAM targeting sequence
  source 1..20: mol_type = other RNA
gaggtccagttatctcctct

SEQ ID NO: 20504 - RNA, 20 nt, synthetic construct
  misc_feature 1..20: note = C9Orf72 CTCN PAM targeting sequence
  source 1..20: mol_type = other RNA
cagaggtccagttatctcct

SEQ ID NO: 20505 - RNA, 20 nt, synthetic construct
  misc_feature 1..20: note = C9Orf72 CTCN PAM targeting sequence
  source 1..20: mol_type = other RNA
agaattgcatgaaactggcc

SEQ ID NO: 20506 - RNA, 20 nt, synthetic construct
  misc_feature 1..20: note = C9Orf72 CTCN PAM targeting sequence
  source 1..20: mol_type = other RNA
ctgagtccagaggacaacaa

SEQ ID NO: 20507 - RNA, 20 nt, synthetic construct
  misc_feature 1..20: note = C9Orf72 CTCN PAM targeting sequence
  source 1..20: mol_type = other RNA
gtgagctctagaattgcatg

SEQ ID NO: 20508 - RNA, 20 nt, synthetic construct
  misc_feature 1..20: note = C9Orf72 CTCN PAM targeting sequence
  source 1..20: mol_type = other RNA
ggactcagtgagctctagaa

SEQ ID NO: 20509 - RNA, 20 nt, synthetic construct
  misc_feature 1..20: note = C9Orf72 CTCN PAM targeting sequence
  source 1..20: mol_type = other RNA
tctcagataactcctatggt

SEQ ID NO: 20510 - RNA, 20 nt, synthetic construct
  misc_feature 1..20: note = C9Orf72 CTCN PAM targeting sequence
  source 1..20: mol_type = other RNA
gataactcctatggtggtta

SEQ ID NO: 20511 - RNA, 20 nt, synthetic construct
  misc_feature 1..20: note = C9Orf72 CTCN PAM targeting sequence
  source 1..20: mol_type = other RNA
tatggtggttaatactagca

SEQ ID NO: 20512 - RNA, 20 nt, synthetic construct
  misc_feature 1..20: note = C9Orf72 CTCN PAM targeting sequence
  source 1..20: mol_type = other RNA
caggcacttaatccaagttc

SEQ ID NO: 20513 - RNA, 20 nt, synthetic construct
  misc_feature 1..20: note = C9Orf72 CTCN PAM targeting sequence
  source 1..20: mol_type = other RNA
aaaagcaggttttcctactt

SEQ ID NO: 20514 - RNA, 20 nt, synthetic construct
  misc_feature 1..20: note = C9Orf72 CTCN PAM targeting sequence
  source 1..20: mol_type = other RNA
aataggtttttctgtttttt

SEQ ID NO: 20515 - RNA, 20 nt, synthetic construct
  misc_feature 1..20: note = C9Orf72 CTCN PAM targeting sequence
  source 1..20: mol_type = other RNA
taggaaacatagttgtttca

SEQ ID NO: 20516 - RNA, 20 nt, synthetic construct
  misc_feature 1..20: note = C9Orf72 CTCN PAM targeting sequence
  source 1..20: mol_type = other RNA
cttaggaaacatagttgttt

SEQ ID NO: 20517 - RNA, 20 nt, synthetic construct
  misc_feature 1..20: note = C9Orf72 CTCN PAM targeting sequence
  source 1..20: mol_type = other RNA
tgatcatgtagaatttaggc

SEQ ID NO: 20518 - RNA, 20 nt, synthetic construct
  misc_feature 1..20: note = C9Orf72 CTCN PAM targeting sequence
  source 1..20: mol_type = other RNA
gtatgcatgatgctttctag

SEQ ID NO: 20519 - RNA, 20 nt, synthetic construct
  misc_feature 1..20: note = C9Orf72 CTCN PAM targeting sequence
  source 1..20: mol_type = other RNA
aatctaatgaaagacataca

SEQ ID NO: 20520 - RNA, 20 nt, synthetic construct
  misc_feature 1..20: note = C9Orf72 CTCN PAM targeting sequence
  source 1..20: mol_type = other RNA
tgatttttttgctccaatct

SEQ ID NO: 20521 - RNA, 20 nt, synthetic construct
  misc_feature 1..20: note = C9Orf72 CTCN PAM targeting sequence
  source 1..20: mol_type = other RNA
cctgatttttttgctccaat

SEQ ID NO: 20522 - RNA, 20 nt, synthetic construct
  misc_feature 1..20: note = C9Orf72 CTCN PAM targeting sequence
  source 1..20: mol_type = other RNA
tttaccctttcaggcaataa

SEQ ID NO: 20523 - RNA, 20 nt, synthetic construct
  misc_feature 1..20: note = C9Orf72 CTCN PAM targeting sequence
  source 1..20: mol_type = other RNA
tcttttaccctttcaggcaa

SEQ ID NO: 20524 - RNA, 20 nt, synthetic construct
  misc_feature 1..20: note = C9Orf72 CTCN PAM targeting sequence
  source 1..20: mol_type = other RNA
ttggttcccagaagactgca

SEQ ID NO: 20525 - RNA, 20 nt, synthetic construct
  misc_feature 1..20: note = C9Orf72 CTCN PAM targeting sequence
  source 1..20: mol_type = other RNA
caagccatctttcatgctgc

SEQ ID NO: 20526 - RNA, 20 nt, synthetic construct
  misc_feature 1..20: note = C9Orf72 CTCN PAM targeting sequence
  source 1..20: mol_type = other RNA
gttaactggtttattaacca

SEQ ID NO: 20527 - RNA, 20 nt, synthetic construct
  misc_feature 1..20: note = C9Orf72 CTCN PAM targeting sequence
  source 1..20: mol_type = other RNA
cttgaagacatatttctgta

SEQ ID NO: 20528 - RNA, 20 nt, synthetic construct
  misc_feature 1..20: note = C9Orf72 CTCN PAM targeting sequence
  source 1..20: mol_type = other RNA
attttcaaccagaatgacac

SEQ ID NO: 20529 - RNA, 20 nt, synthetic construct
  misc_feature 1..20: note = C9Orf72 CTCN PAM targeting sequence
  source 1..20: mol_type = other RNA
tcacatataattaatgcagt

SEQ ID NO: 20530 - RNA, 20 nt, synthetic construct
  misc_feature 1..20: note = C9Orf72 CTCN PAM targeting sequence
  source 1..20: mol_type = other RNA
acaactagggaagcagaaaa

SEQ ID NO: 20531 - RNA, 20 nt, synthetic construct
  misc_feature 1..20: note = C9Orf72 CTCN PAM targeting sequence
  source 1..20: mol_type = other RNA
taaccatatgcttttctgct

SEQ ID NO: 20532 - RNA, 20 nt, synthetic construct
  misc_feature 1..20: note = C9Orf72 CTCN PAM targeting sequence
  source 1..20: mol_type = other RNA
cttaaccatatgcttttctg

SEQ ID NO: 20533 - RNA, 20 nt, synthetic construct
  misc_feature 1..20: note = C9Orf72 CTCN PAM targeting sequence
  source 1..20: mol_type = other RNA
ggaatcagagctggtgtgag

SEQ ID NO: 20534 - RNA, 20 nt, synthetic construct
  misc_feature 1..20: note = C9Orf72 CTCN PAM targeting sequence
  source 1..20: mol_type = other RNA
gattccagagcccactctct

SEQ ID NO: 20535 - RNA, 20 nt, synthetic construct
  misc_feature 1..20: note = C9Orf72 CTCN PAM targeting sequence
  source 1..20: mol_type = other RNA
caccagctctgattccagag

SEQ ID NO: 20536 - RNA, 20 nt, synthetic construct
  misc_feature 1..20: note = C9Orf72 CTCN PAM targeting sequence
  source 1..20: mol_type = other RNA
gtgcctcagtttccccagct

SEQ ID NO: 20537 - RNA, 20 nt, synthetic construct
  misc_feature 1..20: note = C9Orf72 CTCN PAM targeting sequence
  source 1..20: mol_type = other RNA
gtttccccagctacaaaatg

SEQ ID NO: 20538 - RNA, 20 nt, synthetic construct
  misc_feature 1..20: note = C9Orf72 CTCN PAM targeting sequence
  source 1..20: mol_type = other RNA
taggatcattgtgagggtca

SEQ ID NO: 20539 - RNA, 20 nt, synthetic construct
  misc_feature 1..20: note = C9Orf72 CTCN PAM targeting sequence
  source 1..20: mol_type = other RNA
caatgatcctaggagaaatt

SEQ ID NO: 20540 - RNA, 20 nt, synthetic construct
  misc_feature 1..20: note = C9Orf72 CTCN PAM targeting sequence
  source 1..20: mol_type = other RNA
aatgtactgttctaaatcct

SEQ ID NO: 20541 - RNA, 20 nt, synthetic construct
  misc_feature 1..20: note = C9Orf72 CTCN PAM targeting sequence
  source 1..20: mol_type = other RNA
attttactaactatgcagag

SEQ ID NO: 20542 - RNA, 20 nt, synthetic construct
  misc_feature 1..20: note = C9Orf72 CTCN PAM targeting sequence
  source 1..20: mol_type = other RNA
gcatagttagtaaaattgag

SEQ ID NO: 20543 - RNA, 20 nt, synthetic construct
  misc_feature 1..20: note = C9Orf72 CTCN PAM targeting sequence
  source 1..20: mol_type = other RNA
gaatcagcagcagatattgc

SEQ ID NO: 20544 - RNA, 20 nt, synthetic construct
  misc_feature 1..20: note = C9Orf72 CTCN PAM targeting sequence
  source 1..20: mol_type = other RNA
agctctgaatcagcagcaga

SEQ ID NO: 20545 - RNA, 20 nt, synthetic construct
  misc_feature 1..20: note = C9Orf72 CTCN PAM targeting sequence
  source 1..20: mol_type = other RNA
gctctagctctgaatcagca

SEQ ID NO: 20546 - RNA, 20 nt, synthetic construct
  misc_feature 1..20: note = C9Orf72 CTCN PAM targeting sequence
  source 1..20: mol_type = other RNA
cagctctagctctgaatcag

SEQ ID NO: 20547 - RNA, 20 nt, synthetic construct
  misc_feature 1..20: note = C9Orf72 CTCN PAM targeting sequence
  source 1..20: mol_type = other RNA
catttatccagattacagca

SEQ ID NO: 20548 - RNA, 20 nt, synthetic construct
  misc_feature 1..20: note = C9Orf72 CTCN PAM targeting sequence
  source 1..20: mol_type = other RNA
atgtcctacataagatcttt

SEQ ID NO: 20549 - RNA, 20 nt, synthetic construct
  misc_feature 1..20: note = C9Orf72 CTCN PAM targeting sequence
  source 1..20: mol_type = other RNA
tccatgtcctacataagatc

SEQ ID NO: 20550 - RNA, 20 nt, synthetic construct
  misc_feature 1..20: note = C9Orf72 CTCN PAM targeting sequence
  source 1..20: mol_type = other RNA
ataaaccatagtgcatttaa

SEQ ID NO: 20551 - RNA, 20 nt, synthetic construct
  misc_feature 1..20: note = C9Orf72 CTCN PAM targeting sequence
  source 1..20: mol_type = other RNA
aaaaagaaaaaaagaaaaag

SEQ ID NO: 20552 - RNA, 20 nt, synthetic construct
  misc_feature 1..20: note = C9Orf72 CTCN PAM targeting sequence
  source 1..20: mol_type = other RNA
gtctcaaaaaagaaaaaaag

SEQ ID NO: 20553 - RNA, 20 nt, synthetic construct
  misc_feature 1..20: note = C9Orf72 CTCN PAM targeting sequence
  source 1..20: mol_type = other RNA
tgttgtccaggctggagtgc

SEQ ID NO: 20554 - RNA, 20 nt, synthetic construct
  misc_feature 1..20: note = C9Orf72 CTCN PAM targeting sequence
  source 1..20: mol_type = other RNA
agcctggacaacaagagtga

SEQ ID NO: 20555 - RNA, 20 nt, synthetic construct
  misc_feature 1..20: note = C9Orf72 CTCN PAM targeting sequence
  source 1..20: mol_type = other RNA
acctccacctcctgggttca

SEQ ID NO: 20556 - RNA, 20 nt, synthetic construct
  misc_feature 1..20: note = C9Orf72 CTCN PAM targeting sequence
  source 1..20: mol_type = other RNA
acctcctgggttcaagtgat

SEQ ID NO: 20557 - RNA, 20 nt, synthetic construct
  misc_feature 1..20: note = C9Orf72 CTCN PAM targeting sequence
  source 1..20: mol_type = other RNA
tgggttcaagtgattctcct

SEQ ID NO: 20558 - RNA, 20 nt, synthetic construct
  misc_feature 1..20: note = C9Orf72 CTCN PAM targeting sequence
  source 1..20: mol_type = other RNA
tgcctcagcctcctgagtag

SEQ ID NO: 20559 - RNA, 20 nt, synthetic construct
  misc_feature 1..20: note = C9Orf72 CTCN PAM targeting sequence
  source 1..20: mol_type = other RNA
gcctcctgagtagctgggat

SEQ ID NO: 20560 - RNA, 20 nt, synthetic construct
  misc_feature 1..20: note = C9Orf72 CTCN PAM targeting sequence
  source 1..20: mol_type = other RNA
tgagtagctgggattatagg

SEQ ID NO: 20561 - RNA, 20 nt, synthetic construct
  misc_feature 1..20: note = C9Orf72 CTCN PAM targeting sequence
  source 1..20: mol_type = other RNA
ggaggctgaggcaggagaat

SEQ ID NO: 20562 - RNA, 20 nt, synthetic construct
  misc_feature 1..20: note = C9Orf72 CTCN PAM targeting sequence
  source 1..20: mol_type = other RNA
actaaaaatacaaaattagc

SEQ ID NO: 20563 - RNA, 20 nt, synthetic construct
  misc_feature 1..20: note = C9Orf72 CTCN PAM targeting sequence
  source 1..20: mol_type = other RNA
atgttgatcaggctggtctc

SEQ ID NO: 20564 - RNA, 20 nt, synthetic construct
  misc_feature 1..20: note = C9Orf72 CTCN PAM targeting sequence
  source 1..20: mol_type = other RNA
aactcccaacctcaggtgat

SEQ ID NO: 20565 - RNA, 20 nt, synthetic construct
  misc_feature 1..20: note = C9Orf72 CTCN PAM targeting sequence
  source 1..20: mol_type = other RNA
caacctcaggtgatctgccc

SEQ ID NO: 20566 - RNA, 20 nt, synthetic construct
  misc_feature 1..20: note = C9Orf72 CTCN PAM targeting sequence
  source 1..20: mol_type = other RNA
ggtgatctgccctccttggc

SEQ ID NO: 20567 - RNA, 20 nt, synthetic construct
  misc_feature 1..20: note = C9Orf72 CTCN PAM targeting sequence
  source 1..20: mol_type = other RNA
ttggcctcccgaagtgctga

SEQ ID NO: 20568 - RNA, 20 nt, synthetic construct
  misc_feature 1..20: note = C9Orf72 CTCN PAM targeting sequence
  source 1..20: mol_type = other RNA
cgaagtgctgagattacagg

SEQ ID NO: 20569 - RNA, 20 nt, synthetic construct
  misc_feature 1..20: note = C9Orf72 CTCN PAM targeting sequence
  source 1..20: mol_type = other RNA
gcacttcgggaggccaagga

SEQ ID NO: 20570 - RNA, 20 nt, synthetic construct
  misc_feature 1..20: note = C9Orf72 CTCN PAM targeting sequence
  source 1..20: mol_type = other RNA
cacctgtaatctcagcactt

SEQ ID NO: 20571 - RNA, 20 nt, synthetic construct
  misc_feature 1..20: note = C9Orf72 CTCN PAM targeting sequence
  source 1..20: mol_type = other RNA
ttatttaaaagaaattaagt

SEQ ID NO: 20572 - RNA, 20 nt, synthetic construct
  misc_feature 1..20: note = C9Orf72 CTCN PAM targeting sequence
  source 1..20: mol_type = other RNA
ggtaggtgttggttcattca

SEQ ID NO: 20573 - RNA, 20 nt, synthetic construct
  misc_feature 1..20: note = C9Orf72 CTCN PAM targeting sequence
  source 1..20: mol_type = other RNA
agaatcaagatttcacctag

SEQ ID NO: 20574 - RNA, 20 nt, synthetic construct
  misc_feature 1..20: note = C9Orf72 CTCN PAM targeting sequence
  source 1..20: mol_type = other RNA
aggggttctgtgcctggagc

SEQ ID NO: 20575 - RNA, 20 nt, synthetic construct
  misc_feature 1..20: note = C9Orf72 CTCN PAM targeting sequence
  source 1..20: mol_type = other RNA
aggcacagaacccctagagt

SEQ ID NO: 20576 - RNA, 20 nt, synthetic construct
  misc_feature 1..20: note = C9Orf72 CTCN PAM targeting sequence
  source 1..20: mol_type = other RNA
acagttctgatgatagacaa

SEQ ID NO: 20577 - RNA, 20 nt, synthetic construct
  misc_feature 1..20: note = C9Orf72 CTCN PAM targeting sequence
  source 1..20: mol_type = other RNA
tgcaagggcattgtttacat

SEQ ID NO: 20578 - RNA, 20 nt, synthetic construct
  misc_feature 1..20: note = C9Orf72 CTCN PAM targeting sequence
  source 1..20: mol_type = other RNA
cgcctgcaatcccagcacac

SEQ ID NO: 20579 - RNA, 20 nt, synthetic construct
  misc_feature 1..20: note = C9Orf72 CTCN PAM targeting sequence
  source 1..20: mol_type = other RNA
cagtgtgctgggattgcagg

SEQ ID NO: 20580 - RNA, 20 nt, synthetic construct
  misc_feature 1..20: note = C9Orf72 CTCN PAM targeting sequence
  source 1..20: mol_type = other RNA
gcctcccagtgtgctgggat

SEQ ID NO: 20581 - RNA, 20 nt, synthetic construct
  misc_feature 1..20: note = C9Orf72 CTCN PAM targeting sequence
  source 1..20: mol_type = other RNA
aatgatccaccagcctcggc

SEQ ID NO: 20582 - RNA, 20 nt, synthetic construct
  misc_feature 1..20: note = C9Orf72 CTCN PAM targeting sequence
  source 1..20: mol_type = other RNA
tgacctcaaatgatccacca

SEQ ID NO: 20583 - RNA, 20 nt, synthetic construct
  misc_feature 1..20: note = C9Orf72 CTCN PAM targeting sequence
  source 1..20: mol_type = other RNA
actaaaaatacaaaaaaaaa

SEQ ID NO: 20584 - RNA, 20 nt, synthetic construct
  misc_feature 1..20: note = C9Orf72 CTCN PAM targeting sequence
  source 1..20: mol_type = other RNA
gccttccaagtagatgggat

SEQ ID NO: 20585 - RNA, 20 nt, synthetic construct
  misc_feature 1..20: note = C9Orf72 CTCN PAM targeting sequence
  source 1..20: mol_type = other RNA
tgcctcagccttccaagtag

SEQ ID NO: 20586 - RNA, 20 nt, synthetic construct
  misc_feature 1..20: note = C9Orf72 CTCN PAM targeting sequence
  source 1..20: mol_type = other RNA
cctgcctcagccttccaagt

SEQ ID NO: 20587 - RNA, 20 nt, synthetic construct
  misc_feature 1..20: note = C9Orf72 CTCN PAM targeting sequence
  source 1..20: mol_type = other RNA
cgggttcaagggactctcct

SEQ ID NO: 20588 - RNA, 20 nt, synthetic construct
  misc_feature 1..20: note = C9Orf72 CTCN PAM targeting sequence
  source 1..20: mol_type = other RNA
acctcccgggttcaagggac

SEQ ID NO: 20589 - RNA, 20 nt, synthetic construct
  misc_feature 1..20: note = C9Orf72 CTCN PAM targeting sequence
  source 1..20: mol_type = other RNA
ctgcaacctccacctcccgg

SEQ ID NO: 20590 - RNA, 20 nt, synthetic construct
  misc_feature 1..20: note = C9Orf72 CTCN PAM targeting sequence
  source 1..20: mol_type = other RNA
gctcactgcaacctccacct

SEQ ID NO: 20591 - RNA, 20 nt, synthetic construct
  misc_feature 1..20: note = C9Orf72 CTCN PAM targeting sequence
  source 1..20: mol_type = other RNA
agcctgggcaatggagtggg

SEQ ID NO: 20592 - RNA, 20 nt, synthetic construct
  misc_feature 1..20: note = C9Orf72 CTCN PAM targeting sequence
  source 1..20: mol_type = other RNA
attgcccaggctggagtgca

SEQ ID NO: 20593 - RNA, 20 nt, synthetic construct
  misc_feature 1..20: note = C9Orf72 CTCN PAM targeting sequence
  source 1..20: mol_type = other RNA
ttttttcttttttcttttcc

SEQ ID NO: 20594 - RNA, 20 nt, synthetic construct
  misc_feature 1..20: note = C9Orf72 CTCN PAM targeting sequence
  source 1..20: mol_type = other RNA
tgttgaaaagttcattagct

SEQ ID NO: 20595 - RNA, 20 nt, synthetic construct
  misc_feature 1..20: note = C9Orf72 CTCN PAM targeting sequence
  source 1..20: mol_type = other RNA
attccttctctgttgattct

SEQ ID NO: 20596 - RNA, 20 nt, synthetic construct
  misc_feature 1..20: note = C9Orf72 CTCN PAM targeting sequence
  source 1..20: mol_type = other RNA
gttgattctctgcactttat

SEQ ID NO: 20597 - RNA, 20 nt, synthetic construct
  misc_feature 1..20: note = C9Orf72 CTCN PAM targeting sequence
  source 1..20: mol_type = other RNA
gcactttataagcaacagtt

SEQ ID NO: 20598 - RNA, 20 nt, synthetic construct
  misc_feature 1..20: note = C9Orf72 CTCN PAM targeting sequence
  source 1..20: mol_type = other RNA
aaactgttgcttataaagtg

SEQ ID NO: 20599 - RNA, 20 nt, synthetic construct
  misc_feature 1..20: note = C9Orf72 CTCN PAM targeting sequence
  source 1..20: mol_type = other RNA
gtattccaggccttagatca

SEQ ID NO: 20600 - RNA, 20 nt, synthetic construct
  misc_feature 1..20: note = C9Orf72 CTCN PAM targeting sequence
  source 1..20: mol_type = other RNA
ccagaactctgtattccagg

SEQ ID NO: 20601 - RNA, 20 nt, synthetic construct
  misc_feature 1..20: note = C9Orf72 CTCN PAM targeting sequence
  source 1..20: mol_type = other RNA
ccccagaactctgtattcca

SEQ ID NO: 20602 - RNA, 20 nt, synthetic construct
  misc_feature 1..20: note = C9Orf72 CTCN PAM targeting sequence
  source 1..20: mol_type = other RNA
gaaaacacagaagaaagaga

SEQ ID NO: 20603 - RNA, 20 nt, synthetic construct
  misc_feature 1..20: note = C9Orf72 CTCN PAM targeting sequence
  source 1..20: mol_type = other RNA
ttcttctgtgttttctgagg

SEQ ID NO: 20604 - RNA, 20 nt, synthetic construct
  misc_feature 1..20: note = C9Orf72 CTCN PAM targeting sequence
  source 1..20: mol_type = other RNA
tcttcctacttcttgttctc

SEQ ID NO: 20605 - RNA, 20 nt, synthetic construct
  misc_feature 1..20: note = C9Orf72 CTCN PAM targeting sequence
  source 1..20: mol_type = other RNA
aaaatttaagaagatcgtgc

SEQ ID NO: 20606 - RNA, 20 nt, synthetic construct
  misc_feature 1..20: note = C9Orf72 CTCN PAM targeting sequence
  source 1..20: mol_type = other RNA
ataagctagtggtcttctct

SEQ ID NO: 20607 - RNA, 20 nt, synthetic construct
  misc_feature 1..20: note = C9Orf72 CTCN PAM targeting sequence
  source 1..20: mol_type = other RNA
tcctctataagctagtggtc

SEQ ID NO: 20608 - RNA, 20 nt, synthetic construct
  misc_feature 1..20: note = C9Orf72 CTCN PAM targeting sequence
  source 1..20: mol_type = other RNA
cttcctctataagctagtgg

SEQ ID NO: 20609 - RNA, 20 nt, synthetic construct
  misc_feature 1..20: note = C9Orf72 CTCN PAM targeting sequence
  source 1..20: mol_type = other RNA
ggcatatggtaggtcagtaa

SEQ ID NO: 20610 - RNA, 20 nt, synthetic construct
  misc_feature 1..20: note = C9Orf72 CTCN PAM targeting sequence
  source 1..20: mol_type = other RNA
tctgctactagtcccccact

SEQ ID NO: 20611 - RNA, 20 nt, synthetic construct
  misc_feature 1..20: note = C9Orf72 CTCN PAM targeting sequence
  source 1..20: mol_type = other RNA
gcactctcacagcaatggct

SEQ ID NO: 20612 - RNA, 20 nt, synthetic construct
  misc_feature 1..20: note = C9Orf72 CTCN PAM targeting sequence
  source 1..20: mol_type = other RNA
cacagcaatggctccccttc

SEQ ID NO: 20613 - RNA, 20 nt, synthetic construct
  misc_feature 1..20: note = C9Orf72 CTCN PAM targeting sequence
  source 1..20: mol_type = other RNA
cagcaatggctccccttcta

SEQ ID NO: 20614 - RNA, 20 nt, synthetic construct
  misc_feature 1..20: note = C9Orf72 CTCN PAM targeting sequence
  source 1..20: mol_type = other RNA
ccttctagacatacttccca

SEQ ID NO: 20615 - RNA, 20 nt, synthetic construct
  misc_feature 1..20: note = C9Orf72 CTCN PAM targeting sequence
  source 1..20: mol_type = other RNA
gggaaccattctgaagtgga

SEQ ID NO: 20616 - RNA, 20 nt, synthetic construct
  misc_feature 1..20: note = C9Orf72 CTCN PAM targeting sequence
  source 1..20: mol_type = other RNA
acttgcagctttcagcatta

SEQ ID NO: 20617 - RNA, 20 nt, synthetic construct
  misc_feature 1..20: note = C9Orf72 CTCN PAM targeting sequence
  source 1..20: mol_type = other RNA
actatgtcacatgctatttg

SEQ ID NO: 20618 - RNA, 20 nt, synthetic construct
  misc_feature 1..20: note = C9Orf72 CTCN PAM targeting sequence
  source 1..20: mol_type = other RNA
aatagcatgtgacatagttg

SEQ ID NO: 20619 - RNA, 20 nt, synthetic construct
  misc_feature 1..20: note = C9Orf72 CTCN PAM targeting sequence
  source 1..20: mol_type = other RNA
tttattgttagctcatatca

SEQ ID NO: 20620 - RNA, 20 nt, synthetic construct
  misc_feature 1..20: note = C9Orf72 CTCN PAM targeting sequence
  source 1..20: mol_type = other RNA
tatcagatgattagcaaatg

SEQ ID NO: 20621 - RNA, 20 nt, synthetic construct
  misc_feature 1..20: note = C9Orf72 CTCN PAM targeting sequence
  source 1..20: mol_type = other RNA
aactacccagaattattatc

SEQ ID NO: 20622 - RNA, 20 nt, synthetic construct
  misc_feature 1..20: note = C9Orf72 CTCN PAM targeting sequence
  source 1..20: mol_type = other RNA
aggataataattctgggtag

SEQ ID NO: 20623 - RNA, 20 nt, synthetic construct
  misc_feature 1..20: note = C9Orf72 CTCN PAM targeting sequence
  source 1..20: mol_type = other RNA
catgttcttcacctttcagg

SEQ ID NO: 20624 - RNA, 20 nt, synthetic construct
  misc_feature 1..20: note = C9Orf72 CTCN PAM targeting sequence
  source 1..20: mol_type = other RNA
tgttcttcacctttcagggg

SEQ ID NO: 20625 - RNA, 20 nt, synthetic construct
  misc_feature 1..20: note = C9Orf72 CTCN PAM targeting sequence
  source 1..20: mol_type = other RNA
ctagtttttccacaatctgg

SEQ ID NO: 20626 - RNA, 20 nt, synthetic construct
  misc_feature 1..20: note = C9Orf72 CTCN PAM targeting sequence
  source 1..20: mol_type = other RNA
agtttttccacaatctggct

SEQ ID NO: 20627 - RNA, 20 nt, synthetic construct
  misc_feature 1..20: note = C9Orf72 CTCN PAM targeting sequence
  source 1..20: mol_type = other RNA
acttgactttcaagcttctc

SEQ ID NO: 20628 - RNA, 20 nt, synthetic construct
  misc_feature 1..20: note = C9Orf72 CTCN PAM targeting sequence
  source 1..20: mol_type = other RNA
cttaccgccctttccctttg

SEQ ID NO: 20629 - RNA, 20 nt, synthetic construct
  misc_feature 1..20: note = C9Orf72 CTCN PAM targeting sequence
  source 1..20: mol_type = other RNA
taccgccctttccctttgat

SEQ ID NO: 20630 - RNA, 20 nt, synthetic construct
  misc_feature 1..20: note = C9Orf72 CTCN PAM targeting sequence
  source 1..20: mol_type = other RNA
gtaacctctcatataattct

SEQ ID NO: 20631 - RNA, 20 nt, synthetic construct
  misc_feature 1..20: note = C9Orf72 CTCN PAM targeting sequence
  source 1..20: mol_type = other RNA
catataattctctctgcctg

SEQ ID NO: 20632 - RNA, 20 nt, synthetic construct
  misc_feature 1..20: note = C9Orf72 CTCN PAM targeting sequence
  source 1..20: mol_type = other RNA
tataattctctctgcctgaa

SEQ ID NO: 20633 - RNA, 20 nt, synthetic construct
  misc_feature 1..20: note = C9Orf72 CTCN PAM targeting sequence
  source 1..20: mol_type = other RNA
ctgcctgaaatgtcctcacc

SEQ ID NO: 20634 - RNA, 20 nt, synthetic construct
  misc_feature 1..20: note = C9Orf72 CTCN PAM targeting sequence
  source 1..20: mol_type = other RNA
gcctgaaatgtcctcacctc

SEQ ID NO: 20635 - RNA, 20 nt, synthetic construct
  misc_feature 1..20: note = C9Orf72 CTCN PAM targeting sequence
  source 1..20: mol_type = other RNA
cctctccattttgtgtgagc

SEQ ID NO: 20636 - RNA, 20 nt, synthetic construct
  misc_feature 1..20: note = C9Orf72 CTCN PAM targeting sequence
  source 1..20: mol_type = other RNA
ccattttgtgtgagcaaacc

SEQ ID NO: 20637 - RNA, 20 nt, synthetic construct
  misc_feature 1..20: note = C9Orf72 CTCN PAM targeting sequence
  source 1..20: mol_type = other RNA
attttgtgtgagcaaacctt

SEQ ID NO: 20638 - RNA, 20 nt, synthetic construct
  misc_feature 1..20: note = C9Orf72 CTCN PAM targeting sequence
  source 1..20: mol_type = other RNA
cacaaaatggagaggtgagg

SEQ ID NO: 20639 - RNA, 20 nt, synthetic construct
  misc_feature 1..20: note = C9Orf72 CTCN PAM targeting sequence
  source 1..20: mol_type = other RNA
tccatgaagtcttcctggat

SEQ ID NO: 20640 - RNA, 20 nt, synthetic construct
  misc_feature 1..20: note = C9Orf72 CTCN PAM targeting sequence
  source 1..20: mol_type = other RNA
atgaagtcttcctggatttt

SEQ ID NO: 20641 - RNA, 20 nt, synthetic construct
  misc_feature 1..20: note = C9Orf72 CTCN PAM targeting sequence
  source 1..20: mol_type = other RNA
actagtaatacaaaaaccaa

SEQ ID NO: 20642 - RNA, 20 nt, synthetic construct
  misc_feature 1..20: note = C9Orf72 CTCN PAM targeting sequence
  source 1..20: mol_type = other RNA
ttgtatttacattttacatt

SEQ ID NO: 20643 - RNA, 20 nt, synthetic construct
  misc_feature 1..20: note = C9Orf72 CTCN PAM targeting sequence
  source 1..20: mol_type = other RNA
aatagtttcaaattattagt

SEQ ID NO: 20644 - RNA, 20 nt, synthetic construct
  misc_feature 1..20: note = C9Orf72 CTCN PAM targeting sequence
  source 1..20: mol_type = other RNA
tgccattaaaccctattgtg

SEQ ID NO: 20645 - RNA, 20 nt, synthetic construct
  misc_feature 1..20: note = C9Orf72 CTCN PAM targeting sequence
  source 1..20: mol_type = other RNA
aaaactcatgccattaaacc

SEQ ID NO: 20646 - RNA, 20 nt, synthetic construct
  misc_feature 1..20: note = C9Orf72 CTCN PAM targeting sequence
  source 1..20: mol_type = other RNA
atcactttgcatccttgggg

SEQ ID NO: 20647 - RNA, 20 nt, synthetic construct
  misc_feature 1..20: note = C9Orf72 CTCN PAM targeting sequence
  source 1..20: mol_type = other RNA
cccaaggatgcaaagtgatt

SEQ ID NO: 20648 - RNA, 20 nt, synthetic construct
  misc_feature 1..20: note = C9Orf72 CTCN PAM targeting sequence
  source 1..20: mol_type = other RNA
aaaatgttaagtaactcccc

SEQ ID NO: 20649 - RNA, 20 nt, synthetic construct
  misc_feature 1..20: note = C9Orf72 CTCN PAM targeting sequence
  source 1..20: mol_type = other RNA
atttcctcctcttgaaaatg

SEQ ID NO: 20650 - RNA, 20 nt, synthetic construct
  misc_feature 1..20: note = C9Orf72 CTCN PAM targeting sequence
  source 1..20: mol_type = other RNA
tcttgaaaatggaattgctt

SEQ ID NO: 20651 - RNA, 20 nt, synthetic construct
  misc_feature 1..20: note = C9Orf72 CTCN PAM targeting sequence
  source 1..20: mol_type = other RNA
tgaaaatggaattgctttga

SEQ ID NO: 20652 - RNA, 20 nt, synthetic construct
  misc_feature 1..20: note = C9Orf72 CTCN PAM targeting sequence
  source 1..20: mol_type = other RNA
aagcaattccattttcaaga

SEQ ID NO: 20653 - RNA, 20 nt, synthetic construct
  misc_feature 1..20: note = C9Orf72 CTCN PAM targeting sequence
  source 1..20: mol_type = other RNA
tttaatcctcaaagcaattc

SEQ ID NO: 20654 - RNA, 20 nt, synthetic construct
  misc_feature 1..20: note = C9Orf72 CTCN PAM targeting sequence
  source 1..20: mol_type = other RNA
gtaagtttagctactattat

SEQ ID NO: 20655 - RNA, 20 nt, synthetic construct
  misc_feature 1..20: note = C9Orf72 CTCN PAM targeting sequence
  source 1..20: mol_type = other RNA
atttgtgtttgttaataaat

SEQ ID NO: 20656 - RNA, 20 nt, synthetic construct
  misc_feature 1..20: note = C9Orf72 CTCN PAM targeting sequence
  source 1..20: mol_type = other RNA
tcatctataaactaggggtt

SEQ ID NO: 20657 - RNA, 20 nt, synthetic construct
  misc_feature 1..20: note = C9Orf72 CTCN PAM targeting sequence
  source 1..20: mol_type = other RNA
ttccctttccctttcaatct

SEQ ID NO: 20658 - RNA, 20 nt, synthetic construct
  misc_feature 1..20: note = C9Orf72 CTCN PAM targeting sequence
  source 1..20: mol_type = other RNA
aggtgacacctttagtttgg

SEQ ID NO: 20659 - RNA, 20 nt, synthetic construct
  misc_feature 1..20: note = C9Orf72 CTCN PAM targeting sequence
  source 1..20: mol_type = other RNA
agtaaatctctttccctttc

SEQ ID NO: 20660 - RNA, 20 nt, synthetic construct
  misc_feature 1..20: note = C9Orf72 CTCN PAM targeting sequence
  source 1..20: mol_type = other RNA
tacctggttgctggcatatg

SEQ ID NO: 20661 - RNA, 20 nt, synthetic construct
  misc_feature 1..20: note = C9Orf72 CTCN PAM targeting sequence
  source 1..20: mol_type = other RNA
tcactagactgaaagcttcc

SEQ ID NO: 20662 - RNA, 20 nt, synthetic construct
  misc_feature 1..20: note = C9Orf72 CTCN PAM targeting sequence
  source 1..20: mol_type = other RNA
ggaagctttcagtctagtga

SEQ ID NO: 20663 - RNA, 20 nt, synthetic construct
  misc_feature 1..20: note = C9Orf72 CTCN PAM targeting sequence
  source 1..20: mol_type = other RNA
aagcacagtaattgcctatg

SEQ ID NO: 20664 - RNA, 20 nt, synthetic construct
  misc_feature 1..20: note = C9Orf72 CTCN PAM targeting sequence
  source 1..20: mol_type = other RNA
aaatatggcacacaatcaag

SEQ ID NO: 20665 - RNA, 20 nt, synthetic construct
  misc_feature 1..20: note = C9Orf72 CTCN PAM targeting sequence
  source 1..20: mol_type = other RNA
ttctagaaatcttgatgatg

SEQ ID NO: 20666 - RNA, 20 nt, synthetic construct
  misc_feature 1..20: note = C9Orf72 CTCN PAM targeting sequence
  source 1..20: mol_type = other RNA
tattctttttgcttggcaat

SEQ ID NO: 20667 - RNA, 20 nt, synthetic construct
  misc_feature 1..20: note = C9Orf72 CTCN PAM targeting sequence
  source 1..20: mol_type = other RNA
cagggtactaattaatcctt

SEQ ID NO: 20668 - RNA, 20 nt, synthetic construct
  misc_feature 1..20: note = C9Orf72 CTCN PAM targeting sequence
  source 1..20: mol_type = other RNA
gttttgttctcacagggtac

SEQ ID NO: 20669 - RNA, 20 nt, synthetic construct
  misc_feature 1..20: note = C9Orf72 CTCN PAM targeting sequence
  source 1..20: mol_type = other RNA
aatatgtagagagatagtca

SEQ ID NO: 20670 - RNA, 20 nt, synthetic construct
  misc_feature 1..20: note = C9Orf72 CTCN PAM targeting sequence
  source 1..20: mol_type = other RNA
acatatttgagatgaaaaac

SEQ ID NO: 20671 - RNA, 20 nt, synthetic construct
  misc_feature 1..20: note = C9Orf72 CTCN PAM targeting sequence
  source 1..20: mol_type = other RNA
ctacatatttgagatgaaaa

SEQ ID NO: 20672 - RNA, 20 nt, synthetic construct
  misc_feature 1..20: note = C9Orf72 CTCN PAM targeting sequence
  source 1..20: mol_type = other RNA
gtgtctataatttatgtgaa

SEQ ID NO: 20673 - RNA, 20 nt, synthetic construct
  misc_feature 1..20: note = C9Orf72 CTCN PAM targeting sequence
  source 1..20: mol_type = other RNA
tatttatccatctagtttgt

SEQ ID NO: 20674 - RNA, 20 nt, synthetic construct
  misc_feature 1..20: note = C9Orf72 CTCN PAM targeting sequence
  source 1..20: mol_type = other RNA
ctcaaaatttattttcttac

SEQ ID NO: 20675 - RNA, 20 nt, synthetic construct
  misc_feature 1..20: note = C9Orf72 CTCN PAM targeting sequence
  source 1..20: mol_type = other RNA
aaatttattttcttacttgg

SEQ ID NO: 20676 - RNA, 20 nt, synthetic construct
  misc_feature 1..20: note = C9Orf72 CTCN PAM targeting sequence
  source 1..20: mol_type = other RNA
aacattgctgatcacctctg

SEQ ID NO: 20677 - RNA, 20 nt, synthetic construct
  misc_feature 1..20: note = C9Orf72 CTCN PAM targeting sequence
  source 1..20: mol_type = other RNA
gacgactatcagttgttttt

SEQ ID NO: 20678 - RNA, 20 nt, synthetic construct
  misc_feature 1..20: note = C9Orf72 CTCN PAM targeting sequence
  source 1..20: mol_type = other RNA
agcactttctccattaatga

SEQ ID NO: 20679 - RNA, 20 nt, synthetic construct
  misc_feature 1..20: note = C9Orf72 CTCN PAM targeting sequence
  source 1..20: mol_type = other RNA
attaatgaactatacattat

SEQ ID NO: 20680 - RNA, 20 nt, synthetic construct
  misc_feature 1..20: note = C9Orf72 CTCN PAM targeting sequence
  source 1..20: mol_type = other RNA
tgatttataatgtatagttc

SEQ ID NO: 20681 - RNA, 20 nt, synthetic construct
  misc_feature 1..20: note = C9Orf72 CTCN PAM targeting sequence
  source 1..20: mol_type = other RNA
ttatcaaatggaccacttac

SEQ ID NO: 20682 - RNA, 20 nt, synthetic construct
  misc_feature 1..20: note = C9Orf72 CTCN PAM targeting sequence
  source 1..20: mol_type = other RNA
cacagttctcgagtttttac

SEQ ID NO: 20683 - RNA, 20 nt, synthetic construct
  misc_feature 1..20: note = C9Orf72 CTCN PAM targeting sequence
  source 1..20: mol_type = other RNA
cagttctcgagtttttacaa

SEQ ID NO: 20684 - RNA, 20 nt, synthetic construct
  misc_feature 1..20: note = C9Orf72 CTCN PAM targeting sequence
  source 1..20: mol_type = other RNA
agtttttacaaactgcctct

SEQ ID NO: 20685 - RNA, 20 nt, synthetic construct
  misc_feature 1..20: note = C9Orf72 CTCN PAM targeting sequence
  source 1..20: mol_type = other RNA
agaactgtgagagataattg

SEQ ID NO: 20686 - RNA, 20 nt, synthetic construct
  misc_feature 1..20: note = C9Orf72 CTCN PAM targeting sequence
  source 1..20: mol_type = other RNA
ttattcaggaataatttttt

SEQ ID NO: 20687 - RNA, 20 nt, synthetic construct
  misc_feature 1..20: note = C9Orf72 CTCN PAM targeting sequence
  source 1..20: mol_type = other RNA
gtttgccaagtgtttgttaa

SEQ ID NO: 20688 - RNA, 20 nt, synthetic construct
  misc_feature 1..20: note = C9Orf72 CTCN PAM targeting sequence
  source 1..20: mol_type = other RNA
ctaagtagaactcccagaaa

SEQ ID NO: 20689 - RNA, 20 nt, synthetic construct
  misc_feature 1..20: note = C9Orf72 CTCN PAM targeting sequence
  source 1..20: mol_type = other RNA
aagtagaactcccagaaaat

SEQ ID NO: 20690 - RNA, 20 nt, synthetic construct
  misc_feature 1..20: note = C9Orf72 CTCN PAM targeting sequence
  source 1..20: mol_type = other RNA
cagaaaatatgcttggagtg

SEQ ID NO: 20691 - RNA, 20 nt, synthetic construct
  misc_feature 1..20: note = C9Orf72 CTCN PAM targeting sequence
  source 1..20: mol_type = other RNA
aagcatattttctgggagtt

SEQ ID NO: 20692 - RNA, 20 nt, synthetic construct
  misc_feature 1..20: note = C9Orf72 CTCN PAM targeting sequence
  source 1..20: mol_type = other RNA
actccaagcatattttctgg

SEQ ID NO: 20693 - RNA, 20 nt, synthetic construct
  misc_feature 1..20: note = C9Orf72 CTCN PAM targeting sequence
  source 1..20: mol_type = other RNA
aaggacagattttttttttt

SEQ ID NO: 20694 - RNA, 20 nt, synthetic construct
  misc_feature 1..20: note = C9Orf72 CTCN PAM targeting sequence
  source 1..20: mol_type = other RNA
aacatgaagtaatgtgaatt

SEQ ID NO: 20695 - RNA, 20 nt, synthetic construct
  misc_feature 1..20: note = C9Orf72 CTCN PAM targeting sequence
  source 1..20: mol_type = other RNA
ctgtcactttctgcattaca

SEQ ID NO: 20696 - RNA, 20 nt, synthetic construct
  misc_feature 1..20: note = C9Orf72 CTCN PAM targeting sequence
  source 1..20: mol_type = other RNA
tttggaaatttagtggtgtt

SEQ ID NO: 20697 - RNA, 20 nt, synthetic construct
  misc_feature 1..20: note = C9Orf72 CTCN PAM targeting sequence
  source 1..20: mol_type = other RNA
gtaaggaaagaattagccta

SEQ ID NO: 20698 - RNA, 20 nt, synthetic construct
  misc_feature 1..20: note = C9Orf72 CTCN PAM targeting sequence
  source 1..20: mol_type = other RNA
aagcaaggtttttggctctg

SEQ ID NO: 20699 - RNA, 20 nt, synthetic construct
  misc_feature 1..20: note = C9Orf72 CTCN PAM targeting sequence
  source 1..20: mol_type = other RNA
gaaaaaaaaaaaaagaatta

SEQ ID NO: 20700 - RNA, 20 nt, synthetic construct
  misc_feature 1..20: note = C9Orf72 CTCN PAM targeting sequence
  source 1..20: mol_type = other RNA
ttctcggaaaaaaaaaaaaa

SEQ ID NO: 20701 - RNA, 20 nt, synthetic construct
  misc_feature 1..20: note = C9Orf72 CTCN PAM targeting sequence
  source 1..20: mol_type = other RNA
ctctcactctgttgcccagg

SEQ ID NO: 20702 - RNA, 20 nt, synthetic construct
  misc_feature 1..20: note = C9Orf72 CTCN PAM targeting sequence
  source 1..20: mol_type = other RNA
cactctgttgcccaggctag

SEQ ID NO: 20703 - RNA, 20 nt, synthetic construct
  misc_feature 1..20: note = C9Orf72 CTCN PAM targeting sequence
  source 1..20: mol_type = other RNA
ctctgttgcccaggctagag

SEQ ID NO: 20704 - RNA, 20 nt, synthetic construct
  misc_feature 1..20: note = C9Orf72 CTCN PAM targeting sequence
  source 1..20: mol_type = other RNA
gttgcccaggctagagtgca

SEQ ID NO: 20705 - RNA, 20 nt, synthetic construct
  misc_feature 1..20: note = C9Orf72 CTCN PAM targeting sequence
  source 1..20: mol_type = other RNA
agcctgggcaacagagtgag

SEQ ID NO: 20706 - RNA, 20 nt, synthetic construct
  misc_feature 1..20: note = C9Orf72 CTCN PAM targeting sequence
  source 1..20: mol_type = other RNA
atattgcagccttggcctcc

SEQ ID NO: 20707 - RNA, 20 nt, synthetic construct
  misc_feature 1..20: note = C9Orf72 CTCN PAM targeting sequence
  source 1..20: mol_type = other RNA
cgggttcaagtgattctccc

SEQ ID NO: 20708 - RNA, 20 nt, synthetic construct
  misc_feature 1..20: note = C9Orf72 CTCN PAM targeting sequence
  source 1..20: mol_type = other RNA
cacctcagtctcccgagtag

SEQ ID NO: 20709 - RNA, 20 nt, synthetic construct
  misc_feature 1..20: note = C9Orf72 CTCN PAM targeting sequence
  source 1..20: mol_type = other RNA
gtctcccgagtagctgggac

SEQ ID NO: 20710 - RNA, 20 nt, synthetic construct
  misc_feature 1..20: note = C9Orf72 CTCN PAM targeting sequence
  source 1..20: mol_type = other RNA
cgagtagctgggactatagg

SEQ ID NO: 20711 - RNA, 20 nt, synthetic construct
  misc_feature 1..20: note = C9Orf72 CTCN PAM targeting sequence
  source 1..20: mol_type = other RNA
ggagactgaggtgggagaat

SEQ ID NO: 20712 - RNA, 20 nt, synthetic construct
  misc_feature 1..20: note = C9Orf72 CTCN PAM targeting sequence
  source 1..20: mol_type = other RNA
actaaaaatacaaaaattag

SEQ ID NO: 20713 - RNA, 20 nt, synthetic construct
  misc_feature 1..20: note = C9Orf72 CTCN PAM targeting sequence
  source 1..20: mol_type = other RNA
tggcctcaagtgatctgctc

SEQ ID NO: 20714 - RNA, 20 nt, synthetic construct
  misc_feature 1..20: note = C9Orf72 CTCN PAM targeting sequence
  source 1..20: mol_type = other RNA
agtgatctgctcaccttggc

SEQ ID NO: 20715 - RNA, 20 nt, synthetic construct
  misc_feature 1..20: note = C9Orf72 CTCN PAM targeting sequence
  source 1..20: mol_type = other RNA
ccttggcatcccaaagtgct

SEQ ID NO: 20716 - RNA, 20 nt, synthetic construct
  misc_feature 1..20: note = C9Orf72 CTCN PAM targeting sequence
  source 1..20: mol_type = other RNA
gcactttgggatgccaaggt

SEQ ID NO: 20717 - RNA, 20 nt, synthetic construct
  misc_feature 1..20: note = C9Orf72 CTCN PAM targeting sequence
  source 1..20: mol_type = other RNA
tgcctgtaatctcagcactt

SEQ ID NO: 20718 - RNA, 20 nt, synthetic construct
  misc_feature 1..20: note = C9Orf72 CTCN PAM targeting sequence
  source 1..20: mol_type = other RNA
gggggaaaagaagtaggttt

SEQ ID NO: 20719 - RNA, 20 nt, synthetic construct
  misc_feature 1..20: note = C9Orf72 CTCN PAM targeting sequence
  source 1..20: mol_type = other RNA
tgtttatgattactaaattt

SEQ ID NO: 20720 - RNA, 20 nt, synthetic construct
  misc_feature 1..20: note = C9Orf72 CTCN PAM targeting sequence
  source 1..20: mol_type = other RNA
ttattaaaggaccaaggtgc

SEQ ID NO: 20721 - RNA, 20 nt, synthetic construct
  misc_feature 1..20: note = C9Orf72 CTCN PAM targeting sequence
  source 1..20: mol_type = other RNA
cctcctctaccaccatcccc

SEQ ID NO: 20722 - RNA, 20 nt, synthetic construct
  misc_feature 1..20: note = C9Orf72 CTCN PAM targeting sequence
  source 1..20: mol_type = other RNA
tctaccaccatccccacatc

SEQ ID NO: 20723 - RNA, 20 nt, synthetic construct
  misc_feature 1..20: note = C9Orf72 CTCN PAM targeting sequence
  source 1..20: mol_type = other RNA
accaccatccccacatcctt

SEQ ID NO: 20724 - RNA, 20 nt, synthetic construct
  misc_feature 1..20: note = C9Orf72 CTCN PAM targeting sequence
  source 1..20: mol_type = other RNA
aattgggttaaagcagtcac

SEQ ID NO: 20725 - RNA, 20 nt, synthetic construct
  misc_feature 1..20: note = C9Orf72 CTCN PAM targeting sequence
  source 1..20: mol_type = other RNA
gaaccctgtaaacaagattc

SEQ ID NO: 20726 - RNA, 20 nt, synthetic construct
  misc_feature 1..20: note = C9Orf72 CTCN PAM targeting sequence
  source 1..20: mol_type = other RNA
tcaacacactgactactacc

SEQ ID NO: 20727 - RNA, 20 nt, synthetic construct
  misc_feature 1..20: note = C9Orf72 CTCN PAM targeting sequence
  source 1..20: mol_type = other RNA
tctcttcaacacactgacta

SEQ ID NO: 20728 - RNA, 20 nt, synthetic construct
  misc_feature 1..20: note = C9Orf72 CTCN PAM targeting sequence
  source 1..20: mol_type = other RNA
cagagttgcatcgatgtaac

SEQ ID NO: 20729 - RNA, 20 nt, synthetic construct
  misc_feature 1..20: note = C9Orf72 CTCN PAM targeting sequence
  source 1..20: mol_type = other RNA
gtgagaagtttttatctggt

SEQ ID NO: 20730 - RNA, 20 nt, synthetic construct
  misc_feature 1..20: note = C9Orf72 CTCN PAM targeting sequence
  source 1..20: mol_type = other RNA
ctaccactgttacatcgatg

SEQ ID NO: 20731 - RNA, 20 nt, synthetic construct
  misc_feature 1..20: note = C9Orf72 CTCN PAM targeting sequence
  source 1..20: mol_type = other RNA
ttggcacagataggccaccc

SEQ ID NO: 20732 - RNA, 20 nt, synthetic construct
  misc_feature 1..20: note = C9Orf72 CTCN PAM targeting sequence
  source 1..20: mol_type = other RNA
ggactggaacatggaatacc

SEQ ID NO: 20733 - RNA, 20 nt, synthetic construct
  misc_feature 1..20: note = C9Orf72 CTCN PAM targeting sequence
  source 1..20: mol_type = other RNA
caggactggaacatggaata

SEQ ID NO: 20734 - RNA, 20 nt, synthetic construct
  misc_feature 1..20: note = C9Orf72 CTCN PAM targeting sequence
  source 1..20: mol_type = other RNA
tttaaaggtgtaactcctct

SEQ ID NO: 20735 - RNA, 20 nt, synthetic construct
  misc_feature 1..20: note = C9Orf72 CTCN PAM targeting sequence
  source 1..20: mol_type = other RNA
tcttttcatggctgcttggt

SEQ ID NO: 20736 - RNA, 20 nt, synthetic construct
  misc_feature 1..20: note = C9Orf72 CTCN PAM targeting sequence
  source 1..20: mol_type = other RNA
tttcatggctgcttggttcc

SEQ ID NO: 20737 - RNA, 20 nt, synthetic construct
  misc_feature 1..20: note = C9Orf72 CTCN PAM targeting sequence
  source 1..20: mol_type = other RNA
ttggatggcaggaaccaagc

SEQ ID NO: 20738 - RNA, 20 nt, synthetic construct
  misc_feature 1..20: note = C9Orf72 CTCN PAM targeting sequence
  source 1..20: mol_type = other RNA
tctgattctggccaacccat

SEQ ID NO: 20739 - RNA, 20 nt, synthetic construct
  misc_feature 1..20: note = C9Orf72 CTCN PAM targeting sequence
  source 1..20: mol_type = other RNA
gatgatgtaacattttaaat

SEQ ID NO: 20740 - RNA, 20 nt, synthetic construct
  misc_feature 1..20: note = C9Orf72 CTCN PAM targeting sequence
  source 1..20: mol_type = other RNA
agtctttattttattccttt

SEQ ID NO: 20741 - RNA, 20 nt, synthetic construct
  misc_feature 1..20: note = C9Orf72 CTCN PAM targeting sequence
  source 1..20: mol_type = other RNA
cgataaaaaaaaaaaagtcc

SEQ ID NO: 20742 - RNA, 20 nt, synthetic construct
  misc_feature 1..20: note = C9Orf72 CTCN PAM targeting sequence
  source 1..20: mol_type = other RNA
tttttaaggaagtaccaaag

SEQ ID NO: 20743 - RNA, 20 nt, synthetic construct
  misc_feature 1..20: note = C9Orf72 CTCN PAM targeting sequence
  source 1..20: mol_type = other RNA
gcaaaagtggattttcctgg

SEQ ID NO: 20744 - RNA, 20 nt, synthetic construct
  misc_feature 1..20: note = C9Orf72 CTCN PAM targeting sequence
  source 1..20: mol_type = other RNA
ttttttgataattgggtgtg

SEQ ID NO: 20745 - RNA, 20 nt, synthetic construct
  misc_feature 1..20: note = C9Orf72 CTCN PAM targeting sequence
  source 1..20: mol_type = other RNA
ttgcatattttaagttctgc

SEQ ID NO: 20746 - RNA, 20 nt, synthetic construct
  misc_feature 1..20: note = C9Orf72 CTCN PAM targeting sequence
  source 1..20: mol_type = other RNA
tgtaccaaacaccaagtttt

SEQ ID NO: 20747 - RNA, 20 nt, synthetic construct
  misc_feature 1..20: note = C9Orf72 CTCN PAM targeting sequence
  source 1..20: mol_type = other RNA
cttccattttctgtatctct

SEQ ID NO: 20748 - RNA, 20 nt, synthetic construct
  misc_feature 1..20: note = C9Orf72 CTCN PAM targeting sequence
  source 1..20: mol_type = other RNA
ctttcccttttctgcccata

SEQ ID NO: 20749 - RNA, 20 nt, synthetic construct
  misc_feature 1..20: note = C9Orf72 CTCN PAM targeting sequence
  source 1..20: mol_type = other RNA
ttcccttttctgcccataaa

SEQ ID NO: 20750 - RNA, 20 nt, synthetic construct
  misc_feature 1..20: note = C9Orf72 CTCN PAM targeting sequence
  source 1..20: mol_type = other RNA
ccaaccatgtgacagcactg

SEQ ID NO: 20751 - RNA, 20 nt, synthetic construct
  misc_feature 1..20: note = C9Orf72 CTCN PAM targeting sequence
  source 1..20: mol_type = other RNA
aaccatgtgacagcactgag

SEQ ID NO: 20752 - RNA, 20 nt, synthetic construct
  misc_feature 1..20: note = C9Orf72 CTCN PAM targeting sequence
  source 1..20: mol_type = other RNA
gtgctgtcacatggttggag

SEQ ID NO: 20753 - RNA, 20 nt, synthetic construct
  misc_feature 1..20: note = C9Orf72 CTCN PAM targeting sequence
  source 1..20: mol_type = other RNA
tctgtttctgggggttgcct

SEQ ID NO: 20754 - RNA, 20 nt, synthetic construct
  misc_feature 1..20: note = C9Orf72 CTCN PAM targeting sequence
  source 1..20: mol_type = other RNA
aatcattctttgcccaatta

SEQ ID NO: 20755 - RNA, 20 nt, synthetic construct
  misc_feature 1..20: note = C9Orf72 CTCN PAM targeting sequence
  source 1..20: mol_type = other RNA
gttaaatttgatttgtttaa

SEQ ID NO: 20756 - RNA, 20 nt, synthetic construct
  misc_feature 1..20: note = C9Orf72 CTCN PAM targeting sequence
  source 1..20: mol_type = other RNA
tgtatcttataagtatatac

SEQ ID NO: 20757 - RNA, 20 nt, synthetic construct
  misc_feature 1..20: note = C9Orf72 CTCN PAM targeting sequence
  source 1..20: mol_type = other RNA
catcacctcaagcatttatt

SEQ ID NO: 20758 - RNA, 20 nt, synthetic construct
  misc_feature 1..20: note = C9Orf72 CTCN PAM targeting sequence
  source 1..20: mol_type = other RNA
agcatttattgcttctttgt

SEQ ID NO: 20759 - RNA, 20 nt, synthetic construct
  misc_feature 1..20: note = C9Orf72 CTCN PAM targeting sequence
  source 1..20: mol_type = other RNA
tagttattttgaaatgcaca

SEQ ID NO: 20760 - RNA, 20 nt, synthetic construct
  misc_feature 1..20: note = C9Orf72 CTCN PAM targeting sequence
  source 1..20: mol_type = other RNA
tatctatatttttgtactca

SEQ ID NO: 20761 - RNA, 20 nt, synthetic construct
  misc_feature 1..20: note = C9Orf72 CTCN PAM targeting sequence
  source 1..20: mol_type = other RNA
ttaaccatttttattctccc

SEQ ID NO: 20762 - RNA, 20 nt, synthetic construct
  misc_feature 1..20: note = C9Orf72 CTCN PAM targeting sequence
  source 1..20: mol_type = other RNA
cccaccaccattacccctct

SEQ ID NO: 20763 - RNA, 20 nt, synthetic construct
  misc_feature 1..20: note = C9Orf72 CTCN PAM targeting sequence
  source 1..20: mol_type = other RNA
gagcctctggtaatcctcag

SEQ ID NO: 20764 - RNA, 20 nt, synthetic construct
  misc_feature 1..20: note = C9Orf72 CTCN PAM targeting sequence
  source 1..20: mol_type = other RNA
gaggggtaatggtggtgggg

SEQ ID NO: 20765 - RNA, 20 nt, synthetic construct
  misc_feature 1..20: note = C9Orf72 CTCN PAM targeting sequence
  source 1..20: mol_type = other RNA
ggtaatcctcagaatgggag

SEQ ID NO: 20766 - RNA, 20 nt, synthetic construct
  misc_feature 1..20: note = C9Orf72 CTCN PAM targeting sequence
  source 1..20: mol_type = other RNA
gaatgggagaaaatatttgc

SEQ ID NO: 20767 - RNA, 20 nt, synthetic construct
  misc_feature 1..20: note = C9Orf72 CTCN PAM targeting sequence
  source 1..20: mol_type = other RNA
cattctgaggattaccagag

SEQ ID NO: 20768 - RNA, 20 nt, synthetic construct
  misc_feature 1..20: note = C9Orf72 CTCN PAM targeting sequence
  source 1..20: mol_type = other RNA
aacaactcaataggaaaaaa

SEQ ID NO: 20769 - RNA, 20 nt, synthetic construct
  misc_feature 1..20: note = C9Orf72 CTCN PAM targeting sequence
  source 1..20: mol_type = other RNA
ataggaaaaaatgtattacg

SEQ ID NO: 20770 - RNA, 20 nt, synthetic construct
  misc_feature 1..20: note = C9Orf72 CTCN PAM targeting sequence
  source 1..20: mol_type = other RNA
tgaaaaatgtctattcagat

SEQ ID NO: 20771 - RNA, 20 nt, synthetic construct
  misc_feature 1..20: note = C9Orf72 CTCN PAM targeting sequence
  source 1..20: mol_type = other RNA
acatcaccgatcatgagaga

SEQ ID NO: 20772 - RNA, 20 nt, synthetic construct
  misc_feature 1..20: note = C9Orf72 CTCN PAM targeting sequence
  source 1..20: mol_type = other RNA
tgatcggtgatgttgagcac

SEQ ID NO: 20773 - RNA, 20 nt, synthetic construct
  misc_feature 1..20: note = C9Orf72 CTCN PAM targeting sequence
  source 1..20: mol_type = other RNA
catgatcggtgatgttgagc

SEQ ID NO: 20774 - RNA, 20 nt, synthetic construct
  misc_feature 1..20: note = C9Orf72 CTCN PAM targeting sequence
  source 1..20: mol_type = other RNA
agtgataatggcatttgttc

SEQ ID NO: 20775 - RNA, 20 nt, synthetic construct
  misc_feature 1..20: note = C9Orf72 CTCN PAM targeting sequence
  source 1..20: mol_type = other RNA
tcacttccacctgttaagaa

SEQ ID NO: 20776 - RNA, 20 nt, synthetic construct
  misc_feature 1..20: note = C9Orf72 CTCN PAM targeting sequence
  source 1..20: mol_type = other RNA
tcctgaatttttccttcagt

SEQ ID NO: 20777 - RNA, 20 nt, synthetic construct
  misc_feature 1..20: note = C9Orf72 CTCN PAM targeting sequence
  source 1..20: mol_type = other RNA
tgctagttatctctttatca

SEQ ID NO: 20778 - RNA, 20 nt, synthetic construct
  misc_feature 1..20: note = C9Orf72 CTCN PAM targeting sequence
  source 1..20: mol_type = other RNA
ttatcatatgtgttctgcct

SEQ ID NO: 20779 - RNA, 20 nt, synthetic construct
  misc_feature 1..20: note = C9Orf72 CTCN PAM targeting sequence
  source 1..20: mol_type = other RNA
cctaaggtcatatttatgct

SEQ ID NO: 20780 - RNA, 20 nt, synthetic construct
  misc_feature 1..20: note = C9Orf72 CTCN PAM targeting sequence
  source 1..20: mol_type = other RNA
ttcagacctagcataaatat

SEQ ID NO: 20781 - RNA, 20 nt, synthetic construct
  misc_feature 1..20: note = C9Orf72 CTCN PAM targeting sequence
  source 1..20: mol_type = other RNA
ccttcagacctagcataaat

SEQ ID NO: 20782 - RNA, 20 nt, synthetic construct
  misc_feature 1..20: note = C9Orf72 CTCN PAM targeting sequence
  source 1..20: mol_type = other RNA
ctccttcagacctagcataa

SEQ ID NO: 20783 - RNA, 20 nt, synthetic construct
  misc_feature 1..20: note = C9Orf72 CTCN PAM targeting sequence
  source 1..20: mol_type = other RNA
tatgtaagccatggtttcct

SEQ ID NO: 20784 - RNA, 20 nt, synthetic construct
  misc_feature 1..20: note = C9Orf72 CTCN PAM targeting sequence
  source 1..20: mol_type = other RNA
tctacccccaccaaccaaag

SEQ ID NO: 20785 - RNA, 20 nt, synthetic construct
  misc_feature 1..20: note = C9Orf72 CTCN PAM targeting sequence
  source 1..20: mol_type = other RNA
acccccaccaaccaaagcag

SEQ ID NO: 20786 - RNA, 20 nt, synthetic construct
  misc_feature 1..20: note = C9Orf72 CTCN PAM targeting sequence
  source 1..20: mol_type = other RNA
taaatactaattgtagctgg

SEQ ID NO: 20787 - RNA, 20 nt, synthetic construct
  misc_feature 1..20: note = C9Orf72 CTCN PAM targeting sequence
  source 1..20: mol_type = other RNA
gtgtattcattttaatatat

SEQ ID NO: 20788 - RNA, 20 nt, synthetic construct
  misc_feature 1..20: note = C9Orf72 CTCN PAM targeting sequence
  source 1..20: mol_type = other RNA
attactcttaccctttatag

SEQ ID NO: 20789 - RNA, 20 nt, synthetic construct
  misc_feature 1..20: note = C9Orf72 CTCN PAM targeting sequence
  source 1..20: mol_type = other RNA
taccctttataggaaaccac

SEQ ID NO: 20790 - RNA, 20 nt, synthetic construct
  misc_feature 1..20: note = C9Orf72 CTCN PAM targeting sequence
  source 1..20: mol_type = other RNA
taatataaatggaagaaaat

SEQ ID NO: 20791 - RNA, 20 nt, synthetic construct
  misc_feature 1..20: note = C9Orf72 CTCN PAM targeting sequence
  source 1..20: mol_type = other RNA
atgcgctgacatggaaggaa

SEQ ID NO: 20792 - RNA, 20 nt, synthetic construct
  misc_feature 1..20: note = C9Orf72 CTCN PAM targeting sequence
  source 1..20: mol_type = other RNA
ttttttttttttttgacgga

SEQ ID NO: 20793 - RNA, 20 nt, synthetic construct
  misc_feature 1..20: note = C9Orf72 CTCN PAM targeting sequence
  source 1..20: mol_type = other RNA
gtcaaaaaaaaaaaaaaaga

SEQ ID NO: 20794 - RNA, 20 nt, synthetic construct
  misc_feature 1..20: note = C9Orf72 CTCN PAM targeting sequence
  source 1..20: mol_type = other RNA
ctctgtcgcccaggctggat

SEQ ID NO: 20795 - RNA, 20 nt, synthetic construct
  misc_feature 1..20: note = C9Orf72 CTCN PAM targeting sequence
  source 1..20: mol_type = other RNA
gtcgcccaggctggatggag

SEQ ID NO: 20796 - RNA, 20 nt, synthetic construct
  misc_feature 1..20: note = C9Orf72 CTCN PAM targeting sequence
  source 1..20: mol_type = other RNA
atccagcctgggcgacagag

SEQ ID NO: 20797 - RNA, 20 nt, synthetic construct
  misc_feature 1..20: note = C9Orf72 CTCN PAM targeting sequence
  source 1..20: mol_type = other RNA
gctcactgcaagctctgcct

SEQ ID NO: 20798 - RNA, 20 nt, synthetic construct
  misc_feature 1..20: note = C9Orf72 CTCN PAM targeting sequence
  source 1..20: mol_type = other RNA
ctgcaagctctgcctcccgg

SEQ ID NO: 20799 - RNA, 20 nt, synthetic construct
  misc_feature 1..20: note = C9Orf72 CTCN PAM targeting sequence
  source 1..20: mol_type = other RNA
gcctcccgggttcatgccat

SEQ ID NO: 20800 - RNA, 20 nt, synthetic construct
  misc_feature 1..20: note = C9Orf72 CTCN PAM targeting sequence
  source 1..20: mol_type = other RNA
cgggttcatgccattctccg

SEQ ID NO: 20801 - RNA, 20 nt, synthetic construct
  misc_feature 1..20: note = C9Orf72 CTCN PAM targeting sequence
  source 1..20: mol_type = other RNA
ggcctcagcctcccgaatag

SEQ ID NO: 20802 - RNA, 20 nt, synthetic construct
  misc_feature 1..20: note = C9Orf72 CTCN PAM targeting sequence
  source 1..20: mol_type = other RNA
gcctcccgaatagctgggac

SEQ ID NO: 20803 - RNA, 20 nt, synthetic construct
  misc_feature 1..20: note = C9Orf72 CTCN PAM targeting sequence
  source 1..20: mol_type = other RNA
cgaatagctgggactatagg

SEQ ID NO: 20804 - RNA, 20 nt, synthetic construct
  misc_feature 1..20: note = C9Orf72 CTCN PAM targeting sequence
  source 1..20: mol_type = other RNA
actaaaaacaatacaaaaaa

SEQ ID NO: 20805 - RNA, 20 nt, synthetic construct
  misc_feature 1..20: note = C9Orf72 CTCN PAM targeting sequence
  source 1..20: mol_type = other RNA
tgacctcgtgatccacccgc

SEQ ID NO: 20806 - RNA, 20 nt, synthetic construct
  misc_feature 1..20: note = C9Orf72 CTCN PAM targeting sequence
  source 1..20: mol_type = other RNA
tgatccacccgcctcggcct

SEQ ID NO: 20807 - RNA, 20 nt, synthetic construct
  misc_feature 1..20: note = C9Orf72 CTCN PAM targeting sequence
  source 1..20: mol_type = other RNA
gcctcccaaagtgctgggat

SEQ ID NO: 20808 - RNA, 20 nt, synthetic construct
  misc_feature 1..20: note = C9Orf72 CTCN PAM targeting sequence
  source 1..20: mol_type = other RNA
caaagtgctgggattacagg

SEQ ID NO: 20809 - RNA, 20 nt, synthetic construct
  misc_feature 1..20: note = C9Orf72 CTCN PAM targeting sequence
  source 1..20: mol_type = other RNA
tgcctgtaatcccagcactt

SEQ ID NO: 20810 - RNA, 20 nt, synthetic construct
  misc_feature 1..20: note = C9Orf72 CTCN PAM targeting sequence
  source 1..20: mol_type = other RNA
ttctttctaagggctgcaga

SEQ ID NO: 20811 - RNA, 20 nt, synthetic construct
  misc_feature 1..20: note = C9Orf72 CTCN PAM targeting sequence
  source 1..20: mol_type = other RNA
gcagcccttagaaagaatga

SEQ ID NO: 20812 - RNA, 20 nt, synthetic construct
  misc_feature 1..20: note = C9Orf72 CTCN PAM targeting sequence
  source 1..20: mol_type = other RNA
tatatccatccatcacacag

SEQ ID NO: 20813 - RNA, 20 nt, synthetic construct
  misc_feature 1..20: note = C9Orf72 CTCN PAM targeting sequence
  source 1..20: mol_type = other RNA
cccccaaaaatccccaaatt

SEQ ID NO: 20814 - RNA, 20 nt, synthetic construct
  misc_feature 1..20: note = C9Orf72 CTCN PAM targeting sequence
  source 1..20: mol_type = other RNA
agtaattcacaaggaattca

SEQ ID NO: 20815 - RNA, 20 nt, synthetic construct
  misc_feature 1..20: note = C9Orf72 CTCN PAM targeting sequence
  source 1..20: mol_type = other RNA
cctatagaattcaaaaacat

SEQ ID NO: 20816 - RNA, 20 nt, synthetic construct
  misc_feature 1..20: note = C9Orf72 CTCN PAM targeting sequence
  source 1..20: mol_type = other RNA
aagttacaacttctcaccta

SEQ ID NO: 20817 - RNA, 20 nt, synthetic construct
  misc_feature 1..20: note = C9Orf72 CTCN PAM targeting sequence
  source 1..20: mol_type = other RNA
tctagcatcttgaattcttc

SEQ ID NO: 20818 - RNA, 20 nt, synthetic construct
  misc_feature 1..20: note = C9Orf72 CTCN PAM targeting sequence
  source 1..20: mol_type = other RNA
cacagagagaaaacaagtgg

SEQ ID NO: 20819 - RNA, 20 nt, synthetic construct
  misc_feature 1..20: note = C9Orf72 CTCN PAM targeting sequence
  source 1..20: mol_type = other RNA
cagagagaaaacaagtggcg

SEQ ID NO: 20820 - RNA, 20 nt, synthetic construct
  misc_feature 1..20: note = C9Orf72 CTCN PAM targeting sequence
  source 1..20: mol_type = other RNA
gtgagagtagcacacactag

SEQ ID NO: 20821 - RNA, 20 nt, synthetic construct
  misc_feature 1..20: note = C9Orf72 CTCN PAM targeting sequence
  source 1..20: mol_type = other RNA
ctgtgagagtagcacacact

SEQ ID NO: 20822 - RNA, 20 nt, synthetic construct
  misc_feature 1..20: note = C9Orf72 CTCN PAM targeting sequence
  source 1..20: mol_type = other RNA
ccacttgttttctctctgtg

SEQ ID NO: 20823 - RNA, 20 nt, synthetic construct
  misc_feature 1..20: note = C9Orf72 CTCN PAM targeting sequence
  source 1..20: mol_type = other RNA
gcaagtagatcacctaagga

SEQ ID NO: 20824 - RNA, 20 nt, synthetic construct
  misc_feature 1..20: note = C9Orf72 CTCN PAM targeting sequence
  source 1..20: mol_type = other RNA
cttaattgtcctgatatcgt

SEQ ID NO: 20825 - RNA, 20 nt, synthetic construct
  misc_feature 1..20: note = C9Orf72 CTCN PAM targeting sequence
  source 1..20: mol_type = other RNA
ctcccttaattgtcctgata

SEQ ID NO: 20826 - RNA, 20 nt, synthetic construct
  misc_feature 1..20: note = C9Orf72 CTCN PAM targeting sequence
  source 1..20: mol_type = other RNA
gtgtcccctcactcccttaa

SEQ ID NO: 20827 - RNA, 20 nt, synthetic construct
  misc_feature 1..20: note = C9Orf72 CTCN PAM targeting sequence
  source 1..20: mol_type = other RNA
tccctgttctctgtgtcccc

SEQ ID NO: 20828 - RNA, 20 nt, synthetic construct
  misc_feature 1..20: note = C9Orf72 CTCN PAM targeting sequence
  source 1..20: mol_type = other RNA
atgcccatcttgggtggcca

SEQ ID NO: 20829 - RNA, 20 nt, synthetic construct
  misc_feature 1..20: note = C9Orf72 CTCN PAM targeting sequence
  source 1..20: mol_type = other RNA
ccaacatagagaaagggtga

SEQ ID NO: 20830 - RNA, 20 nt, synthetic construct
  misc_feature 1..20: note = C9Orf72 CTCN PAM targeting sequence
  source 1..20: mol_type = other RNA
atgttggggagcttcccctg

SEQ ID NO: 20831 - RNA, 20 nt, synthetic construct
  misc_feature 1..20: note = C9Orf72 CTCN PAM targeting sequence
  source 1..20: mol_type = other RNA
ccctttctctatgttgggga

SEQ ID NO: 20832 - RNA, 20 nt, synthetic construct
  misc_feature 1..20: note = C9Orf72 CTCN PAM targeting sequence
  source 1..20: mol_type = other RNA
ctcaccctttctctatgttg

SEQ ID NO: 20833 - RNA, 20 nt, synthetic construct
  misc_feature 1..20: note = C9Orf72 CTCN PAM targeting sequence
  source 1..20: mol_type = other RNA
ctcactcaccctttctctat

SEQ ID NO: 20834 - RNA, 20 nt, synthetic construct
  misc_feature 1..20: note = C9Orf72 CTCN PAM targeting sequence
  source 1..20: mol_type = other RNA
cactcactcaccctttctct

SEQ ID NO: 20835 - RNA, 20 nt, synthetic construct
  misc_feature 1..20: note = C9Orf72 CTCN PAM targeting sequence
  source 1..20: mol_type = other RNA
ctttccacagggacctgtga

SEQ ID NO: 20836 - RNA, 20 nt, synthetic construct
  misc_feature 1..20: note = C9Orf72 CTCN PAM targeting sequence
  source 1..20: mol_type = other RNA
agttcccaggatttcacagg

SEQ ID NO: 20837 - RNA, 20 nt, synthetic construct
  misc_feature 1..20: note = C9Orf72 CTCN PAM targeting sequence
  source 1..20: mol_type = other RNA
agactgacatagagagttgc

SEQ ID NO: 20838 - RNA, 20 nt, synthetic construct
  misc_feature 1..20: note = C9Orf72 CTCN PAM targeting sequence
  source 1..20: mol_type = other RNA
atgtcagtctagaggcccag

SEQ ID NO: 20839 - RNA, 20 nt, synthetic construct
  misc_feature 1..20: note = C9Orf72 CTCN PAM targeting sequence
  source 1..20: mol_type = other RNA
ctatgtcagtctagaggccc

SEQ ID NO: 20840 - RNA, 20 nt, synthetic construct
  misc_feature 1..20: note = C9Orf72 CTCN PAM targeting sequence
  source 1..20: mol_type = other RNA
agcaactctctatgtcagtc

SEQ ID NO: 20841 - RNA, 20 nt, synthetic construct
  misc_feature 1..20: note = C9Orf72 CTCN PAM targeting sequence
  source 1..20: mol_type = other RNA
gcaaacactccagcaactct

SEQ ID NO: 20842 - RNA, 20 nt, synthetic construct
  misc_feature 1..20: note = C9Orf72 CTCN PAM targeting sequence
  source 1..20: mol_type = other RNA
agtccacaggaagtcccaca

SEQ ID NO: 20843 - RNA, 20 nt, synthetic construct
  misc_feature 1..20: note = C9Orf72 CTCN PAM targeting sequence
  source 1..20: mol_type = other RNA
aggtccaaggcctgtgggac

SEQ ID NO: 20844 - RNA, 20 nt, synthetic construct
  misc_feature 1..20: note = C9Orf72 CTCN PAM targeting sequence
  source 1..20: mol_type = other RNA
tgccagctgccatagccctg

SEQ ID NO: 20845 - RNA, 20 nt, synthetic construct
  misc_feature 1..20: note = C9Orf72 CTCN PAM targeting sequence
  source 1..20: mol_type = other RNA
gggctatggcagctggcatg

SEQ ID NO: 20846 - RNA, 20 nt, synthetic construct
  misc_feature 1..20: note = C9Orf72 CTCN PAM targeting sequence
  source 1..20: mol_type = other RNA
cagggctatggcagctggca

SEQ ID NO: 20847 - RNA, 20 nt, synthetic construct
  misc_feature 1..20: note = C9Orf72 CTCN PAM targeting sequence
  source 1..20: mol_type = other RNA
ctaactgtggcttctctcag

SEQ ID NO: 20848 - RNA, 20 nt, synthetic construct
  misc_feature 1..20: note = C9Orf72 CTCN PAM targeting sequence
  source 1..20: mol_type = other RNA
ccatcatcagacaaggctta

SEQ ID NO: 20849 - RNA, 20 nt, synthetic construct
  misc_feature 1..20: note = C9Orf72 CTCN PAM targeting sequence
  source 1..20: mol_type = other RNA
gcctgaactctgtgggcagg

SEQ ID NO: 20850 - RNA, 20 nt, synthetic construct
  misc_feature 1..20: note = C9Orf72 CTCN PAM targeting sequence
  source 1..20: mol_type = other RNA
gtgggcaggcacagctctct

SEQ ID NO: 20851 - RNA, 20 nt, synthetic construct
  misc_feature 1..20: note = C9Orf72 CTCN PAM targeting sequence
  source 1..20: mol_type = other RNA
ctgttaccctggaaatcagt

SEQ ID NO: 20852 - RNA, 20 nt, synthetic construct
  misc_feature 1..20: note = C9Orf72 CTCN PAM targeting sequence
  source 1..20: mol_type = other RNA
gttaccctggaaatcagttg

SEQ ID NO: 20853 - RNA, 20 nt, synthetic construct
  misc_feature 1..20: note = C9Orf72 CTCN PAM targeting sequence
  source 1..20: mol_type = other RNA
acccactgtccaactgattt

SEQ ID NO: 20854 - RNA, 20 nt, synthetic construct
  misc_feature 1..20: note = C9Orf72 CTCN PAM targeting sequence
  source 1..20: mol_type = other RNA
caacccactgtccaactgat

SEQ ID NO: 20855 - RNA, 20 nt, synthetic construct
  misc_feature 1..20: note = C9Orf72 CTCN PAM targeting sequence
  source 1..20: mol_type = other RNA
tggctacaggcagtgggggt

SEQ ID NO: 20856 - RNA, 20 nt, synthetic construct
  misc_feature 1..20: note = C9Orf72 CTCN PAM targeting sequence
  source 1..20: mol_type = other RNA
tggtgctcaagcagtggggg

SEQ ID NO: 20857 - RNA, 20 nt, synthetic construct
  misc_feature 1..20: note = C9Orf72 CTCN PAM targeting sequence
  source 1..20: mol_type = other RNA
agcagtgggggatcccctac

SEQ ID NO: 20858 - RNA, 20 nt, synthetic construct
  misc_feature 1..20: note = C9Orf72 CTCN PAM targeting sequence
  source 1..20: mol_type = other RNA
cagaacactgagaggggtga

SEQ ID NO: 20859 - RNA, 20 nt, synthetic construct
  misc_feature 1..20: note = C9Orf72 CTCN PAM targeting sequence
  source 1..20: mol_type = other RNA
gaacactgagaggggtgaga

SEQ ID NO: 20860 - RNA, 20 nt, synthetic construct
  misc_feature 1..20: note = C9Orf72 CTCN PAM targeting sequence
  source 1..20: mol_type = other RNA
gtgttctgagagtaggggat

SEQ ID NO: 20861 - RNA, 20 nt, synthetic construct
  misc_feature 1..20: note = C9Orf72 CTCN PAM targeting sequence
  source 1..20: mol_type = other RNA
cagtgttctgagagtagggg

SEQ ID NO: 20862 - RNA, 20 nt, synthetic construct
  misc_feature 1..20: note = C9Orf72 CTCN PAM targeting sequence
  source 1..20: mol_type = other RNA
cccctctcagtgttctgaga

SEQ ID NO: 20863 - RNA, 20 nt, synthetic construct
  misc_feature 1..20: note = C9Orf72 CTCN PAM targeting sequence
  source 1..20: mol_type = other RNA
ggaacagggtgtgcctcctt

SEQ ID NO: 20864 - RNA, 20 nt, synthetic construct
  misc_feature 1..20: note = C9Orf72 CTCN PAM targeting sequence
  source 1..20: mol_type = other RNA
ttgtgcagggccagccaggg

SEQ ID NO: 20865 - RNA, 20 nt, synthetic construct
  misc_feature 1..20: note = C9Orf72 CTCN PAM targeting sequence
  source 1..20: mol_type = other RNA
gcctgagggcaccctgcagc

SEQ ID NO: 20866 - RNA, 20 nt, synthetic construct
  misc_feature 1..20: note = C9Orf72 CTCN PAM targeting sequence
  source 1..20: mol_type = other RNA
ggcagaggctgcggctggaa

SEQ ID NO: 20867 - RNA, 20 nt, synthetic construct
  misc_feature 1..20: note = C9Orf72 CTCN PAM targeting sequence
  source 1..20: mol_type = other RNA
tattactggcactgcacctg

SEQ ID NO: 20868 - RNA, 20 nt, synthetic construct
  misc_feature 1..20: note = C9Orf72 CTCN PAM targeting sequence
  source 1..20: mol_type = other RNA
cttattactggcactgcacc

SEQ ID NO: 20869 - RNA, 20 nt, synthetic construct
  misc_feature 1..20: note = C9Orf72 CTCN PAM targeting sequence
  source 1..20: mol_type = other RNA
cccaaggcccaggaatgtat

SEQ ID NO: 20870 - RNA, 20 nt, synthetic construct
  misc_feature 1..20: note = C9Orf72 CTCN PAM targeting sequence
  source 1..20: mol_type = other RNA
ccagatacattcctgggcct

SEQ ID NO: 20871 - RNA, 20 nt, synthetic construct
  misc_feature 1..20: note = C9Orf72 CTCN PAM targeting sequence
  source 1..20: mol_type = other RNA
ccctaccaccacagagcact

SEQ ID NO: 20872 - RNA, 20 nt, synthetic construct
  misc_feature 1..20: note = C9Orf72 CTCN PAM targeting sequence
  source 1..20: mol_type = other RNA
ctaccaccacagagcactac

SEQ ID NO: 20873 - RNA, 20 nt, synthetic construct
  misc_feature 1..20: note = C9Orf72 CTCN PAM targeting sequence
  source 1..20: mol_type = other RNA
gtggtggtagggagagatga

SEQ ID NO: 20874 - RNA, 20 nt, synthetic construct
  misc_feature 1..20: note = C9Orf72 CTCN PAM targeting sequence
  source 1..20: mol_type = other RNA
gtagtgctctgtggtggtag

SEQ ID NO: 20875 - RNA, 20 nt, synthetic construct
  misc_feature 1..20: note = C9Orf72 CTCN PAM targeting sequence
  source 1..20: mol_type = other RNA
tttgtattttggtgcagtcc

SEQ ID NO: 20876 - RNA, 20 nt, synthetic construct
  misc_feature 1..20: note = C9Orf72 CTCN PAM targeting sequence
  source 1..20: mol_type = other RNA
gtccacagctcttttgtatt

SEQ ID NO: 20877 - RNA, 20 nt, synthetic construct
  misc_feature 1..20: note = C9Orf72 CTCN PAM targeting sequence
  source 1..20: mol_type = other RNA
tactcagtccacagctcttt

SEQ ID NO: 20878 - RNA, 20 nt, synthetic construct
  misc_feature 1..20: note = C9Orf72 CTCN PAM targeting sequence
  source 1..20: mol_type = other RNA
taagcatcacctactggatt

SEQ ID NO: 20879 - RNA, 20 nt, synthetic construct
  misc_feature 1..20: note = C9Orf72 CTCN PAM targeting sequence
  source 1..20: mol_type = other RNA
gtacagcatctttatttgtg

SEQ ID NO: 20880 - RNA, 20 nt, synthetic construct
  misc_feature 1..20: note = C9Orf72 CTCN PAM targeting sequence
  source 1..20: mol_type = other RNA
gaatgaagccaactgactat

SEQ ID NO: 20881 - RNA, 20 nt, synthetic construct
  misc_feature 1..20: note = C9Orf72 CTCN PAM targeting sequence
  source 1..20: mol_type = other RNA
atgtacactattgttaatgg

SEQ ID NO: 20882 - RNA, 20 nt, synthetic construct
  misc_feature 1..20: note = C9Orf72 CTCN PAM targeting sequence
  source 1..20: mol_type = other RNA
tatgttaaagagtcatctca

SEQ ID NO: 20883 - RNA, 20 nt, synthetic construct
  misc_feature 1..20: note = C9Orf72 CTCN PAM targeting sequence
  source 1..20: mol_type = other RNA
ttaacatatgagggctggtg

SEQ ID NO: 20884 - RNA, 20 nt, synthetic construct
  misc_feature 1..20: note = C9Orf72 CTCN PAM targeting sequence
  source 1..20: mol_type = other RNA
agaactctagcaattcaaaa

SEQ ID NO: 20885 - RNA, 20 nt, synthetic construct
  misc_feature 1..20: note = C9Orf72 CTCN PAM targeting sequence
  source 1..20: mol_type = other RNA
agcaattcaaaaaagctggt

SEQ ID NO: 20886 - RNA, 20 nt, synthetic construct
  misc_feature 1..20: note = C9Orf72 CTCN PAM targeting sequence
  source 1..20: mol_type = other RNA
ttacctccagacaaacacac

SEQ ID NO: 20887 - RNA, 20 nt, synthetic construct
  misc_feature 1..20: note = C9Orf72 CTCN PAM targeting sequence
  source 1..20: mol_type = other RNA
agacaaacacacaagtcctc

SEQ ID NO: 20888 - RNA, 20 nt, synthetic construct
  misc_feature 1..20: note = C9Orf72 CTCN PAM targeting sequence
  source 1..20: mol_type = other RNA
agcaaaggattttaaccaga

SEQ ID NO: 20889 - RNA, 20 nt, synthetic construct
  misc_feature 1..20: note = C9Orf72 CTCN PAM targeting sequence
  source 1..20: mol_type = other RNA
aatgacatacatagaattca

SEQ ID NO: 20890 - RNA, 20 nt, synthetic construct
  misc_feature 1..20: note = C9Orf72 CTCN PAM targeting sequence
  source 1..20: mol_type = other RNA
tggatcttgatgtacttcct

SEQ ID NO: 20891 - RNA, 20 nt, synthetic construct
  misc_feature 1..20: note = C9Orf72 CTCN PAM targeting sequence
  source 1..20: mol_type = other RNA
aggaatccagaaaaatgatc

SEQ ID NO: 20892 - RNA, 20 nt, synthetic construct
  misc_feature 1..20: note = C9Orf72 CTCN PAM targeting sequence
  source 1..20: mol_type = other RNA
ttgatcatttttctggattc

SEQ ID NO: 20893 - RNA, 20 nt, synthetic construct
  misc_feature 1..20: note = C9Orf72 CTCN PAM targeting sequence
  source 1..20: mol_type = other RNA
atttctgaagttcagttttg

SEQ ID NO: 20894 - RNA, 20 nt, synthetic construct
  misc_feature 1..20: note = C9Orf72 CTCN PAM targeting sequence
  source 1..20: mol_type = other RNA
gactatattatgaaattttt

SEQ ID NO: 20895 - RNA, 20 nt, synthetic construct
  misc_feature 1..20: note = C9Orf72 CTCN PAM targeting sequence
  source 1..20: mol_type = other RNA
gcttggtctgttctgctgtt

SEQ ID NO: 20896 - RNA, 20 nt, synthetic construct
  misc_feature 1..20: note = C9Orf72 CTCN PAM targeting sequence
  source 1..20: mol_type = other RNA
gagtttgaagaccagttatt

SEQ ID NO: 20897 - RNA, 20 nt, synthetic construct
  misc_feature 1..20: note = C9Orf72 CTCN PAM targeting sequence
  source 1..20: mol_type = other RNA
gagattctttcctcagcttg

SEQ ID NO: 20898 - RNA, 20 nt, synthetic construct
  misc_feature 1..20: note = C9Orf72 CTCN PAM targeting sequence
  source 1..20: mol_type = other RNA
taaatcttgaaggttttgtt

SEQ ID NO: 20899 - RNA, 20 nt, synthetic construct
  misc_feature 1..20: note = C9Orf72 CTCN PAM targeting sequence
  source 1..20: mol_type = other RNA
ttacataacctcataaatct

SEQ ID NO: 20900 - RNA, 20 nt, synthetic construct
  misc_feature 1..20: note = C9Orf72 CTCN PAM targeting sequence
  source 1..20: mol_type = other RNA
cagtcattcctgagaaagag

SEQ ID NO: 20901 - RNA, 20 nt, synthetic construct
  misc_feature 1..20: note = C9Orf72 CTCN PAM targeting sequence
  source 1..20: mol_type = other RNA
ggaatgactgtgagtcatag

SEQ ID NO: 20902 - RNA, 20 nt, synthetic construct
  misc_feature 1..20: note = C9Orf72 CTCN PAM targeting sequence
  source 1..20: mol_type = other RNA
ttctcaggaatgactgtgag

SEQ ID NO: 20903 - RNA, 20 nt, synthetic construct
  misc_feature 1..20: note = C9Orf72 CTCN PAM targeting sequence
  source 1..20: mol_type = other RNA
ctttctcaggaatgactgtg

SEQ ID NO: 20904 - RNA, 20 nt, synthetic construct
  misc_feature 1..20: note = C9Orf72 CTCN PAM targeting sequence
  source 1..20: mol_type = other RNA
gatgtatgttctaagttgct

SEQ ID NO: 20905 - RNA, 20 nt, synthetic construct
  misc_feature 1..20: note = C9Orf72 CTCN PAM targeting sequence
  source 1..20: mol_type = other RNA
ccagagaggtgggcatacaa

SEQ ID NO: 20906 - RNA, 20 nt, synthetic construct
  misc_feature 1..20: note = C9Orf72 CTCN PAM targeting sequence
  source 1..20: mol_type = other RNA
ggtgagataggggaaatttt

SEQ ID NO: 20907 - RNA, 20 nt, synthetic construct
  misc_feature 1..20: note = C9Orf72 CTCN PAM targeting sequence
  source 1..20: mol_type = other RNA
ctggtgagataggggaaatt

SEQ ID NO: 20908 - RNA, 20 nt, synthetic construct
  misc_feature 1..20: note = C9Orf72 CTCN PAM targeting sequence
  source 1..20: mol_type = other RNA
gtatttcttgaatttgtatg

SEQ ID NO: 20909 - RNA, 20 nt, synthetic construct
  misc_feature 1..20: note = C9Orf72 CTCN PAM targeting sequence
  source 1..20: mol_type = other RNA
tgtgagacactatacaagac

SEQ ID NO: 20910 - RNA, 20 nt, synthetic construct
  misc_feature 1..20: note = C9Orf72 CTCN PAM targeting sequence
  source 1..20: mol_type = other RNA
caggagttctctgtatttct

SEQ ID NO: 20911 - RNA, 20 nt, synthetic construct
  misc_feature 1..20: note = C9Orf72 CTCN PAM targeting sequence
  source 1..20: mol_type = other RNA
ctagctgccttaacaatttt

SEQ ID NO: 20912 - RNA, 20 nt, synthetic construct
  misc_feature 1..20: note = C9Orf72 CTCN PAM targeting sequence
  source 1..20: mol_type = other RNA
tcaggccagcaacagttctg

SEQ ID NO: 20913 - RNA, 20 nt, synthetic construct
  misc_feature 1..20: note = C9Orf72 CTCN PAM targeting sequence
  source 1..20: mol_type = other RNA
tatcccaccaaactgagttt

SEQ ID NO: 20914 - RNA, 20 nt, synthetic construct
  misc_feature 1..20: note = C9Orf72 CTCN PAM targeting sequence
  source 1..20: mol_type = other RNA
gtttggtgggatatgagttc

SEQ ID NO: 20915 - RNA, 20 nt, synthetic construct
  misc_feature 1..20: note = C9Orf72 CTCN PAM targeting sequence
  source 1..20: mol_type = other RNA
ttcacttatgaaactcagtt

SEQ ID NO: 20916 - RNA, 20 nt, synthetic construct
  misc_feature 1..20: note = C9Orf72 CTCN PAM targeting sequence
  source 1..20: mol_type = other RNA
gacaagcaagcaccaaggag

SEQ ID NO: 20917 - RNA, 20 nt, synthetic construct
  misc_feature 1..20: note = C9Orf72 CTCN PAM targeting sequence
  source 1..20: mol_type = other RNA
ttggtgcttgcttgtctgag

SEQ ID NO: 20918 - RNA, 20 nt, synthetic construct
  misc_feature 1..20: note = C9Orf72 CTCN PAM targeting sequence
  source 1..20: mol_type = other RNA
tgtcattgtgttgtttagct

SEQ ID NO: 20919 - RNA, 20 nt, synthetic construct
  misc_feature 1..20: note = C9Orf72 CTCN PAM targeting sequence
  source 1..20: mol_type = other RNA
catgtcaatgctaaccctaa

SEQ ID NO: 20920 - RNA, 20 nt, synthetic construct
  misc_feature 1..20: note = C9Orf72 CTCN PAM targeting sequence
  source 1..20: mol_type = other RNA
ccctttaaaatgcataaagt

SEQ ID NO: 20921 - RNA, 20 nt, synthetic construct
  misc_feature 1..20: note = C9Orf72 CTCN PAM targeting sequence
  source 1..20: mol_type = other RNA
ctttaaaatgcataaagtgg

SEQ ID NO: 20922 - RNA, 20 nt, synthetic construct
  misc_feature 1..20: note = C9Orf72 CTCN PAM targeting sequence
  source 1..20: mol_type = other RNA
caggctcaaagtgaaagaat

SEQ ID NO: 20923 - RNA, 20 nt, synthetic construct
  misc_feature 1..20: note = C9Orf72 CTCN PAM targeting sequence
  source 1..20: mol_type = other RNA
aagtgaaagaatgaagaaag

SEQ ID NO: 20924 - RNA, 20 nt, synthetic construct
  misc_feature 1..20: note = C9Orf72 CTCN PAM targeting sequence
  source 1..20: mol_type = other RNA
tttttgtttttcatttgcat

SEQ ID NO: 20925 - RNA, 20 nt, synthetic construct
  misc_feature 1..20: note = C9Orf72 CTCN PAM targeting sequence
  source 1..20: mol_type = other RNA
tgctcttttttgtttttcat

SEQ ID NO: 20926 - RNA, 20 nt, synthetic construct
  misc_feature 1..20: note = C9Orf72 CTCN PAM targeting sequence
  source 1..20: mol_type = other RNA
agtgttgggtgcatatatgt

SEQ ID NO: 20927 - RNA, 20 nt, synthetic construct
  misc_feature 1..20: note = C9Orf72 CTCN PAM targeting sequence
  source 1..20: mol_type = other RNA
gattcataaaacaaattatt

SEQ ID NO: 20928 - RNA, 20 nt, synthetic construct
  misc_feature 1..20: note = C9Orf72 CTCN PAM targeting sequence
  source 1..20: mol_type = other RNA
actgatagcattagacagat

SEQ ID NO: 20929 - RNA, 20 nt, synthetic construct
  misc_feature 1..20: note = C9Orf72 CTCN PAM targeting sequence
  source 1..20: mol_type = other RNA
gtgatctgtctaatgctatc

SEQ ID NO: 20930 - RNA, 20 nt, synthetic construct
  misc_feature 1..20: note = C9Orf72 CTCN PAM targeting sequence
  source 1..20: mol_type = other RNA
ctaggatactcaagccaaca

SEQ ID NO: 20931 - RNA, 20 nt, synthetic construct
  misc_feature 1..20: note = C9Orf72 CTCN PAM targeting sequence
  source 1..20: mol_type = other RNA
aggatactcaagccaacaat

SEQ ID NO: 20932 - RNA, 20 nt, synthetic construct
  misc_feature 1..20: note = C9Orf72 CTCN PAM targeting sequence
  source 1..20: mol_type = other RNA
agccaacaatgacagaacac

SEQ ID NO: 20933 - RNA, 20 nt, synthetic construct
  misc_feature 1..20: note = C9Orf72 CTCN PAM targeting sequence
  source 1..20: mol_type = other RNA
tatgcacatggaacgtattc

SEQ ID NO: 20934 - RNA, 20 nt, synthetic construct
  misc_feature 1..20: note = C9Orf72 CTCN PAM targeting sequence
  source 1..20: mol_type = other RNA
gtcataaagcaagtctcaat

SEQ ID NO: 20935 - RNA, 20 nt, synthetic construct
  misc_feature 1..20: note = C9Orf72 CTCN PAM targeting sequence
  source 1..20: mol_type = other RNA
ataaattaaaaaaaattaaa

SEQ ID NO: 20936 - RNA, 20 nt, synthetic construct
  misc_feature 1..20: note = C9Orf72 CTCN PAM targeting sequence
  source 1..20: mol_type = other RNA
caaatcatagtgaaataaca

SEQ ID NO: 20937 - RNA, 20 nt, synthetic construct
  misc_feature 1..20: note = C9Orf72 CTCN PAM targeting sequence
  source 1..20: mol_type = other RNA
aatcatagtgaaataacaat

SEQ ID NO: 20938 - RNA, 20 nt, synthetic construct
  misc_feature 1..20: note = C9Orf72 CTCN PAM targeting sequence
  source 1..20: mol_type = other RNA
caaaactacacaaaagcatg

SEQ ID NO: 20939 - RNA, 20 nt, synthetic construct
  misc_feature 1..20: note = C9Orf72 CTCN PAM targeting sequence
  source 1..20: mol_type = other RNA
aaactacacaaaagcatgga

SEQ ID NO: 20940 - RNA, 20 nt, synthetic construct
  misc_feature 1..20: note = C9Orf72 CTCN PAM targeting sequence
  source 1..20: mol_type = other RNA
cgaataactgttgggtgaac

SEQ ID NO: 20941 - RNA, 20 nt, synthetic construct
  misc_feature 1..20: note = C9Orf72 CTCN PAM targeting sequence
  source 1..20: mol_type = other RNA
attttcattaatttcaaata

SEQ ID NO: 20942 - RNA, 20 nt, synthetic construct
  misc_feature 1..20: note = C9Orf72 CTCN PAM targeting sequence
  source 1..20: mol_type = other RNA
taacactgcttttgctacat

SEQ ID NO: 20943 - RNA, 20 nt, synthetic construct
  misc_feature 1..20: note = C9Orf72 CTCN PAM targeting sequence
  source 1..20: mol_type = other RNA
tgatgaaggcattttagcac

SEQ ID NO: 20944 - RNA, 20 nt, synthetic construct
  misc_feature 1..20: note = C9Orf72 CTCN PAM targeting sequence
  source 1..20: mol_type = other RNA
actaaacaatctaacataac

SEQ ID NO: 20945 - RNA, 20 nt, synthetic construct
  misc_feature 1..20: note = C9Orf72 CTCN PAM targeting sequence
  source 1..20: mol_type = other RNA
agtgttatgttagattgttt

SEQ ID NO: 20946 - RNA, 20 nt, synthetic construct
  misc_feature 1..20: note = C9Orf72 CTCN PAM targeting sequence
  source 1..20: mol_type = other RNA
ttttttctagttcctctagt

SEQ ID NO: 20947 - RNA, 20 nt, synthetic construct
  misc_feature 1..20: note = C9Orf72 CTCN PAM targeting sequence
  source 1..20: mol_type = other RNA
cagctagcagaggaaaagac

SEQ ID NO: 20948 - RNA, 20 nt, synthetic construct
  misc_feature 1..20: note = C9Orf72 CTCN PAM targeting sequence
  source 1..20: mol_type = other RNA
gctagctgtgagattgaatt

SEQ ID NO: 20949 - RNA, 20 nt, synthetic construct
  misc_feature 1..20: note = C9Orf72 CTCN PAM targeting sequence
  source 1..20: mol_type = other RNA
attttatttagtcattatct

SEQ ID NO: 20950 - RNA, 20 nt, synthetic construct
  misc_feature 1..20: note = C9Orf72 CTCN PAM targeting sequence
  source 1..20: mol_type = other RNA
ttgtttcactaacattttat

SEQ ID NO: 20951 - RNA, 20 nt, synthetic construct
  misc_feature 1..20: note = C9Orf72 CTCN PAM targeting sequence
  source 1..20: mol_type = other RNA
tttttctagctagcagtcta

SEQ ID NO: 20952 - RNA, 20 nt, synthetic construct
  misc_feature 1..20: note = C9Orf72 CTCN PAM targeting sequence
  source 1..20: mol_type = other RNA
gaaaatctttggcatttctg

SEQ ID NO: 20953 - RNA, 20 nt, synthetic construct
  misc_feature 1..20: note = C9Orf72 CTCN PAM targeting sequence
  source 1..20: mol_type = other RNA
atgcacacaaagtaggaaat

SEQ ID NO: 20954 - RNA, 20 nt, synthetic construct
  misc_feature 1..20: note = C9Orf72 CTCN PAM targeting sequence
  source 1..20: mol_type = other RNA
agatttcctactttgtgtgc

SEQ ID NO: 20955 - RNA, 20 nt, synthetic construct
  misc_feature 1..20: note = C9Orf72 CTCN PAM targeting sequence
  source 1..20: mol_type = other RNA
caagattgaaccaggacgga

SEQ ID NO: 20956 - RNA, 20 nt, synthetic construct
  misc_feature 1..20: note = C9Orf72 CTCN PAM targeting sequence
  source 1..20: mol_type = other RNA
ttaatattatggaatagttt

SEQ ID NO: 20957 - RNA, 20 nt, synthetic construct
  misc_feature 1..20: note = C9Orf72 CTCN PAM targeting sequence
  source 1..20: mol_type = other RNA
ccttaatattatggaatagt

SEQ ID NO: 20958 - RNA, 20 nt, synthetic construct
  misc_feature 1..20: note = C9Orf72 CTCN PAM targeting sequence
  source 1..20: mol_type = other RNA
tccctaactcattctacaat

SEQ ID NO: 20959 - RNA, 20 nt, synthetic construct
  misc_feature 1..20: note = C9Orf72 CTCN PAM targeting sequence
  source 1..20: mol_type = other RNA
ctaactcattctacaatgcc

SEQ ID NO: 20960 - RNA, 20 nt, synthetic construct
  misc_feature 1..20: note = C9Orf72 CTCN PAM targeting sequence
  source 1..20: mol_type = other RNA
ttctacaatgccagcatcat

SEQ ID NO: 20961 - RNA, 20 nt, synthetic construct
  misc_feature 1..20: note = C9Orf72 CTCN PAM targeting sequence
  source 1..20: mol_type = other RNA
ggcagattttgatatcagga

SEQ ID NO: 20962 - RNA, 20 nt, synthetic construct
  misc_feature 1..20: note = C9Orf72 CTCN PAM targeting sequence
  source 1..20: mol_type = other RNA
gattaacataaacacgaaaa

SEQ ID NO: 20963 - RNA, 20 nt, synthetic construct
  misc_feature 1..20: note = C9Orf72 CTCN PAM targeting sequence
  source 1..20: mol_type = other RNA
acaaaatatgagcaaactaa

SEQ ID NO: 20964 - RNA, 20 nt, synthetic construct
  misc_feature 1..20: note = C9Orf72 CTCN PAM targeting sequence
  source 1..20: mol_type = other RNA
tattttgttgaggattttcg

SEQ ID NO: 20965 - RNA, 20 nt, synthetic construct
  misc_feature 1..20: note = C9Orf72 CTCN PAM targeting sequence
  source 1..20: mol_type = other RNA
atagtttcagaaaaaacctt

SEQ ID NO: 20966 - RNA, 20 nt, synthetic construct
  misc_feature 1..20: note = C9Orf72 CTCN PAM targeting sequence
  source 1..20: mol_type = other RNA
acaggctaggcatcaaagga

SEQ ID NO: 20967 - RNA, 20 nt, synthetic construct
  misc_feature 1..20: note = C9Orf72 CTCN PAM targeting sequence
  source 1..20: mol_type = other RNA
tgagtactggaacaagacaa

SEQ ID NO: 20968 - RNA, 20 nt, synthetic construct
  misc_feature 1..20: note = C9Orf72 CTCN PAM targeting sequence
  source 1..20: mol_type = other RNA
agagaaatgcttccagcatt

SEQ ID NO: 20969 - RNA, 20 nt, synthetic construct
  misc_feature 1..20: note = C9Orf72 CTCN PAM targeting sequence
  source 1..20: mol_type = other RNA
caccactcctattcagcatt

SEQ ID NO: 20970 - RNA, 20 nt, synthetic construct
  misc_feature 1..20: note = C9Orf72 CTCN PAM targeting sequence
  source 1..20: mol_type = other RNA
ccactcctattcagcattgc

SEQ ID NO: 20971 - RNA, 20 nt, synthetic construct
  misc_feature 1..20: note = C9Orf72 CTCN PAM targeting sequence
  source 1..20: mol_type = other RNA
tattcagcattgccctggaa

SEQ ID NO: 20972 - RNA, 20 nt, synthetic construct
  misc_feature 1..20: note = C9Orf72 CTCN PAM targeting sequence
  source 1..20: mol_type = other RNA
gactaggacttccagggcaa

SEQ ID NO: 20973 - RNA, 20 nt, synthetic construct
  misc_feature 1..20: note = C9Orf72 CTCN PAM targeting sequence
  source 1..20: mol_type = other RNA
tgcctagttgctctgactag

SEQ ID NO: 20974 - RNA, 20 nt, synthetic construct
  misc_feature 1..20: note = C9Orf72 CTCN PAM targeting sequence
  source 1..20: mol_type = other RNA
ctttgctgatgatatgattt

SEQ ID NO: 20975 - RNA, 20 nt, synthetic construct
  misc_feature 1..20: note = C9Orf72 CTCN PAM targeting sequence
  source 1..20: mol_type = other RNA
ttgctgatgatatgatttca

SEQ ID NO: 20976 - RNA, 20 nt, synthetic construct
  misc_feature 1..20: note = C9Orf72 CTCN PAM targeting sequence
  source 1..20: mol_type = other RNA
aaaagtctcctagaactgat

SEQ ID NO: 20977 - RNA, 20 nt, synthetic construct
  misc_feature 1..20: note = C9Orf72 CTCN PAM targeting sequence
  source 1..20: mol_type = other RNA
tagaactgataaataacttc

SEQ ID NO: 20978 - RNA, 20 nt, synthetic construct
  misc_feature 1..20: note = C9Orf72 CTCN PAM targeting sequence
  source 1..20: mol_type = other RNA
atgctcatggattggaataa

SEQ ID NO: 20979 - RNA, 20 nt, synthetic construct
  misc_feature 1..20: note = C9Orf72 CTCN PAM targeting sequence
  source 1..20: mol_type = other RNA
tggattggaataatcaatat

SEQ ID NO: 20980 - RNA, 20 nt, synthetic construct
  misc_feature 1..20: note = C9Orf72 CTCN PAM targeting sequence
  source 1..20: mol_type = other RNA
aatgctatccctagcaaaat

SEQ ID NO: 20981 - RNA, 20 nt, synthetic construct
  misc_feature 1..20: note = C9Orf72 CTCN PAM targeting sequence
  source 1..20: mol_type = other RNA
tttttggttccatatgaatt

SEQ ID NO: 20982 - RNA, 20 nt, synthetic construct
  misc_feature 1..20: note = C9Orf72 CTCN PAM targeting sequence
  source 1..20: mol_type = other RNA
ggcttcgttctttttgctta

SEQ ID NO: 20983 - RNA, 20 nt, synthetic construct
  misc_feature 1..20: note = C9Orf72 CTCN PAM targeting sequence
  source 1..20: mol_type = other RNA
gtgtctgtttttgtaccaga

SEQ ID NO: 20984 - RNA, 20 nt, synthetic construct
  misc_feature 1..20: note = C9Orf72 CTCN PAM targeting sequence
  source 1..20: mol_type = other RNA
agatggattaaagatttaaa

SEQ ID NO: 20985 - RNA, 20 nt, synthetic construct
  misc_feature 1..20: note = C9Orf72 CTCN PAM targeting sequence
  source 1..20: mol_type = other RNA
acgttggctttggcaaacaa

SEQ ID NO: 20986 - RNA, 20 nt, synthetic construct
  misc_feature 1..20: note = C9Orf72 CTCN PAM targeting sequence
  source 1..20: mol_type = other RNA
ttaattaggtcccacttgcc

SEQ ID NO: 20987 - RNA, 20 nt, synthetic construct
  misc_feature 1..20: note = C9Orf72 CTCN PAM targeting sequence
  source 1..20: mol_type = other RNA
gttggtaatttcttttgctg

SEQ ID NO: 20988 - RNA, 20 nt, synthetic construct
  misc_feature 1..20: note = C9Orf72 CTCN PAM targeting sequence
  source 1..20: mol_type = other RNA
cattctgtagcctgtttact

SEQ ID NO: 20989 - RNA, 20 nt, synthetic construct
  misc_feature 1..20: note = C9Orf72 CTCN PAM targeting sequence
  source 1..20: mol_type = other RNA
aatgattagtgaatgttgag

SEQ ID NO: 20990 - RNA, 20 nt, synthetic construct
  misc_feature 1..20: note = C9Orf72 CTCN PAM targeting sequence
  source 1..20: mol_type = other RNA
ctgtggtttggatttccatt

SEQ ID NO: 20991 - RNA, 20 nt, synthetic construct
  misc_feature 1..20: note = C9Orf72 CTCN PAM targeting sequence
  source 1..20: mol_type = other RNA
acaatcttttcaccagcatc

SEQ ID NO: 20992 - RNA, 20 nt, synthetic construct
  misc_feature 1..20: note = C9Orf72 CTCN PAM targeting sequence
  source 1..20: mol_type = other RNA
tttctccacaatcttttcac

SEQ ID NO: 20993 - RNA, 20 nt, synthetic construct
  misc_feature 1..20: note = C9Orf72 CTCN PAM targeting sequence
  source 1..20: mol_type = other RNA
cacatccctcaccgcttcgc

SEQ ID NO: 20994 - RNA, 20 nt, synthetic construct
  misc_feature 1..20: note = C9Orf72 CTCN PAM targeting sequence
  source 1..20: mol_type = other RNA
ccgcttcgctccagtctctt

SEQ ID NO: 20995 - RNA, 20 nt, synthetic construct
  misc_feature 1..20: note = C9Orf72 CTCN PAM targeting sequence
  source 1..20: mol_type = other RNA
agtctctttggaggcatggg

SEQ ID NO: 20996 - RNA, 20 nt, synthetic construct
  misc_feature 1..20: note = C9Orf72 CTCN PAM targeting sequence
  source 1..20: mol_type = other RNA
ttggaggcatgggatccacg

SEQ ID NO: 20997 - RNA, 20 nt, synthetic construct
  misc_feature 1..20: note = C9Orf72 CTCN PAM targeting sequence
  source 1..20: mol_type = other RNA
aaagagactggagcgaagcg

SEQ ID NO: 20998 - RNA, 20 nt, synthetic construct
  misc_feature 1..20: note = C9Orf72 CTCN PAM targeting sequence
  source 1..20: mol_type = other RNA
gctgacactactggcgtgga

SEQ ID NO: 20999 - RNA, 20 nt, synthetic construct
  misc_feature 1..20: note = C9Orf72 CTCN PAM targeting sequence
  source 1..20: mol_type = other RNA
tcctggcaggctgcgctcag

SEQ ID NO: 21000 - RNA, 20 nt, synthetic construct
  misc_feature 1..20: note = C9Orf72 CTCN PAM targeting sequence
  source 1..20: mol_type = other RNA
ggtccactgggcccactcat

SEQ ID NO: 21001 - RNA, 20 nt, synthetic construct
  misc_feature 1..20: note = C9Orf72 CTCN PAM targeting sequence
  source 1..20: mol_type = other RNA
tgcaaaggtgccaccgccac

SEQ ID NO: 21002 - RNA, 20 nt, synthetic construct
  misc_feature 1..20: note = C9Orf72 CTCN PAM targeting sequence
  source 1..20: mol_type = other RNA
gtggcggtggcacctttgca

SEQ ID NO: 21003 - RNA, 20 nt, synthetic construct
  misc_feature 1..20: note = C9Orf72 CTCN PAM targeting sequence
  source 1..20: mol_type = other RNA
tgactgaaaaatactgatac

SEQ ID NO: 21004 - RNA, 20 nt, synthetic construct
  misc_feature 1..20: note = C9Orf72 CTCN PAM targeting sequence
  source 1..20: mol_type = other RNA
acaagaagtaggcaatttcc

SEQ ID NO: 21005 - RNA, 20 nt, synthetic construct
  misc_feature 1..20: note = C9Orf72 CTCN PAM targeting sequence
  source 1..20: mol_type = other RNA
actagaaactacttcacatc

SEQ ID NO: 21006 - RNA, 20 nt, synthetic construct
  misc_feature 1..20: note = C9Orf72 CTCN PAM targeting sequence
  source 1..20: mol_type = other RNA
aaaaataacactaagcatga

SEQ ID NO: 21007 - RNA, 20 nt, synthetic construct
  misc_feature 1..20: note = C9Orf72 CTCN PAM targeting sequence
  source 1..20: mol_type = other RNA
atataaatgaaaatttctgg

SEQ ID NO: 21008 - RNA, 20 nt, synthetic construct
  misc_feature 1..20: note = C9Orf72 CTCN PAM targeting sequence
  source 1..20: mol_type = other RNA
attctgataatcagaaagaa

SEQ ID NO: 21009 - RNA, 20 nt, synthetic construct
  misc_feature 1..20: note = C9Orf72 CTCN PAM targeting sequence
  source 1..20: mol_type = other RNA
aaagtcattatctgttcttt

SEQ ID NO: 21010 - RNA, 20 nt, synthetic construct
  misc_feature 1..20: note = C9Orf72 CTCN PAM targeting sequence
  source 1..20: mol_type = other RNA
ctggtcaatataatattaaa

SEQ ID NO: 21011 - RNA, 20 nt, synthetic construct
  misc_feature 1..20: note = C9Orf72 CTCN PAM targeting sequence
  source 1..20: mol_type = other RNA
ttgaccaaaaaaatggattc

SEQ ID NO: 21012 - RNA, 20 nt, synthetic construct
  misc_feature 1..20: note = C9Orf72 CTCN PAM targeting sequence
  source 1..20: mol_type = other RNA
tttcatgatatttcatctca

SEQ ID NO: 21013 - RNA, 20 nt, synthetic construct
  misc_feature 1..20: note = C9Orf72 CTCN PAM targeting sequence
  source 1..20: mol_type = other RNA
gaggtagaataattatttct

SEQ ID NO: 21014 - RNA, 20 nt, synthetic construct
  misc_feature 1..20: note = C9Orf72 CTCN PAM targeting sequence
  source 1..20: mol_type = other RNA
gagatgaaatatcatgaaag

SEQ ID NO: 21015 - RNA, 20 nt, synthetic construct
  misc_feature 1..20: note = C9Orf72 CTCN PAM targeting sequence
  source 1..20: mol_type = other RNA
ctgtcggaaagatgaatagc

SEQ ID NO: 21016 - RNA, 20 nt, synthetic construct
  misc_feature 1..20: note = C9Orf72 CTCN PAM targeting sequence
  source 1..20: mol_type = other RNA
gtcggaaagatgaatagctt

SEQ ID NO: 21017 - RNA, 20 nt, synthetic construct
  misc_feature 1..20: note = C9Orf72 CTCN PAM targeting sequence
  source 1..20: mol_type = other RNA
ataaatcattagcataaaaa

SEQ ID NO: 21018 - RNA, 20 nt, synthetic construct
  misc_feature 1..20: note = C9Orf72 CTCN PAM targeting sequence
  source 1..20: mol_type = other RNA
tgtaaattataaataagttt

SEQ ID NO: 21019 - RNA, 20 nt, synthetic construct
  misc_feature 1..20: note = C9Orf72 CTCN PAM targeting sequence
  source 1..20: mol_type = other RNA
tcatactgacttctcatgta

SEQ ID NO: 21020 - RNA, 20 nt, synthetic construct
  misc_feature 1..20: note = C9Orf72 CTCN PAM targeting sequence
  source 1..20: mol_type = other RNA
ctgttcctgtccttctctct

SEQ ID NO: 21021 - RNA, 20 nt, synthetic construct
  misc_feature 1..20: note = C9Orf72 CTCN PAM targeting sequence
  source 1..20: mol_type = other RNA
gttcctgtccttctctcttg

SEQ ID NO: 21022 - RNA, 20 nt, synthetic construct
  misc_feature 1..20: note = C9Orf72 CTCN PAM targeting sequence
  source 1..20: mol_type = other RNA
cttgatagtaaggtgacttt

SEQ ID NO: 21023 - RNA, 20 nt, synthetic construct
  misc_feature 1..20: note = C9Orf72 CTCN PAM targeting sequence
  source 1..20: mol_type = other RNA
tgatagtaaggtgactttag

SEQ ID NO: 21024 - RNA, 20 nt, synthetic construct
  misc_feature 1..20: note = C9Orf72 CTCN PAM targeting sequence
  source 1..20: mol_type = other RNA
tgattattaaaagttttttt

SEQ ID NO: 21025 - RNA, 20 nt, synthetic construct
  misc_feature 1..20: note = C9Orf72 CTCN PAM targeting sequence
  source 1..20: mol_type = other RNA
ctacctgcttggtctcttgt

SEQ ID NO: 21026 - RNA, 20 nt, synthetic construct
  misc_feature 1..20: note = C9Orf72 CTCN PAM targeting sequence
  source 1..20: mol_type = other RNA
acctgcttggtctcttgttc

SEQ ID NO: 21027 - RNA, 20 nt, synthetic construct
  misc_feature 1..20: note = C9Orf72 CTCN PAM targeting sequence
  source 1..20: mol_type = other RNA
tgttcatatgcaatttttct

SEQ ID NO: 21028 - RNA, 20 nt, synthetic construct
  misc_feature 1..20: note = C9Orf72 CTCN PAM targeting sequence
  source 1..20: mol_type = other RNA
acaaaaagtgttattgttta

SEQ ID NO: 21029 - RNA, 20 nt, synthetic construct
  misc_feature 1..20: note = C9Orf72 CTCN PAM targeting sequence
  source 1..20: mol_type = other RNA
taatttttgaaatatgccac

SEQ ID NO: 21030 - RNA, 20 nt, synthetic construct
  misc_feature 1..20: note = C9Orf72 CTCN PAM targeting sequence
  source 1..20: mol_type = other RNA
attcttattaacacatgtaa

SEQ ID NO: 21031 - RNA, 20 nt, synthetic construct
  misc_feature 1..20: note = C9Orf72 CTCN PAM targeting sequence
  source 1..20: mol_type = other RNA
attgtacctacacctgattt

SEQ ID NO: 21032 - RNA, 20 nt, synthetic construct
  misc_feature 1..20: note = C9Orf72 CTCN PAM targeting sequence
  source 1..20: mol_type = other RNA
ggaccatatcgctgctgata

SEQ ID NO: 21033 - RNA, 20 nt, synthetic construct
  misc_feature 1..20: note = C9Orf72 CTCN PAM targeting sequence
  source 1..20: mol_type = other RNA
aaaaatacaaaaaataaaaa

SEQ ID NO: 21034 - RNA, 20 nt, synthetic construct
  misc_feature 1..20: note = C9Orf72 CTCN PAM targeting sequence
  source 1..20: mol_type = other RNA
actgcactccagcctgggtg

SEQ ID NO: 21035 - RNA, 20 nt, synthetic construct
  misc_feature 1..20: note = C9Orf72 CTCN PAM targeting sequence
  source 1..20: mol_type = other RNA
gctcactgcaaactccacct

SEQ ID NO: 21036 - RNA, 20 nt, synthetic construct
  misc_feature 1..20: note = C9Orf72 CTCN PAM targeting sequence
  source 1..20: mol_type = other RNA
ctgcaaactccacctcctgg

SEQ ID NO: 21037 - RNA, 20 nt, synthetic construct
  misc_feature 1..20: note = C9Orf72 CTCN PAM targeting sequence
  source 1..20: mol_type = other RNA
acctcctgggttcaagcgaa

SEQ ID NO: 21038 - RNA, 20 nt, synthetic construct
  misc_feature 1..20: note = C9Orf72 CTCN PAM targeting sequence
  source 1..20: mol_type = other RNA
tgggttcaagcgaagaatcc

SEQ ID NO: 21039 - RNA, 20 nt, synthetic construct
  misc_feature 1..20: note = C9Orf72 CTCN PAM targeting sequence
  source 1..20: mol_type = other RNA
tgaatttctcctctagcttt

SEQ ID NO: 21040 - RNA, 20 nt, synthetic construct
  misc_feature 1..20: note = C9Orf72 CTCN PAM targeting sequence
  source 1..20: mol_type = other RNA
tctagctttctcttacttca

SEQ ID NO: 21041 - RNA, 20 nt, synthetic construct
  misc_feature 1..20: note = C9Orf72 CTCN PAM targeting sequence
  source 1..20: mol_type = other RNA
agctttctcttacttcattt

SEQ ID NO: 21042 - RNA, 20 nt, synthetic construct
  misc_feature 1..20: note = C9Orf72 CTCN PAM targeting sequence
  source 1..20: mol_type = other RNA
tacttcatttgcatggctta

SEQ ID NO: 21043 - RNA, 20 nt, synthetic construct
  misc_feature 1..20: note = C9Orf72 CTCN PAM targeting sequence
  source 1..20: mol_type = other RNA
taatttccgcaactgcaatc

SEQ ID NO: 21044 - RNA, 20 nt, synthetic construct
  misc_feature 1..20: note = C9Orf72 CTCN PAM targeting sequence
  source 1..20: mol_type = other RNA
gtttactgagaatggaaaac

SEQ ID NO: 21045 - RNA, 20 nt, synthetic construct
  misc_feature 1..20: note = C9Orf72 CTCN PAM targeting sequence
  source 1..20: mol_type = other RNA
gtaaactgagattgcagttg

SEQ ID NO: 21046 - RNA, 20 nt, synthetic construct
  misc_feature 1..20: note = C9Orf72 CTCN PAM targeting sequence
  source 1..20: mol_type = other RNA
ctccaaggcctgagaattct

SEQ ID NO: 21047 - RNA, 20 nt, synthetic construct
  misc_feature 1..20: note = C9Orf72 CTCN PAM targeting sequence
  source 1..20: mol_type = other RNA
aaggcctgagaattcttggt

SEQ ID NO: 21048 - RNA, 20 nt, synthetic construct
  misc_feature 1..20: note = C9Orf72 CTCN PAM targeting sequence
  source 1..20: mol_type = other RNA
ggccttggagggagttttcc

SEQ ID NO: 21049 - RNA, 20 nt, synthetic construct
  misc_feature 1..20: note = C9Orf72 CTCN PAM targeting sequence
  source 1..20: mol_type = other RNA
gtgttaaccaagaattctca

SEQ ID NO: 21050 - RNA, 20 nt, synthetic construct
  misc_feature 1..20: note = C9Orf72 CTCN PAM targeting sequence
  source 1..20: mol_type = other RNA
tgggaaatgccctccgtgtt

SEQ ID NO: 21051 - RNA, 20 nt, synthetic construct
  misc_feature 1..20: note = C9Orf72 CTCN PAM targeting sequence
  source 1..20: mol_type = other RNA
tctacactcttgggaaatgc

SEQ ID NO: 21052 - RNA, 20 nt, synthetic construct
  misc_feature 1..20: note = C9Orf72 CTCN PAM targeting sequence
  source 1..20: mol_type = other RNA
gcctgttgggcttcctcttc

SEQ ID NO: 21053 - RNA, 20 nt, synthetic construct
  misc_feature 1..20: note = C9Orf72 CTCN PAM targeting sequence
  source 1..20: mol_type = other RNA
aacttaaatatacaaggtga

SEQ ID NO: 21054 - RNA, 20 nt, synthetic construct
  misc_feature 1..20: note = C9Orf72 CTCN PAM targeting sequence
  source 1..20: mol_type = other RNA
tttgtgtgaactttagggag

SEQ ID NO: 21055 - RNA, 20 nt, synthetic construct
  misc_feature 1..20: note = C9Orf72 CTCN PAM targeting sequence
  source 1..20: mol_type = other RNA
ctaaagttcacacaaaagag

SEQ ID NO: 21056 - RNA, 20 nt, synthetic construct
  misc_feature 1..20: note = C9Orf72 CTCN PAM targeting sequence
  source 1..20: mol_type = other RNA
aaaatacatctactttccag

SEQ ID NO: 21057 - RNA, 20 nt, synthetic construct
  misc_feature 1..20: note = C9Orf72 CTCN PAM targeting sequence
  source 1..20: mol_type = other RNA
aaatagaataccactatcac

SEQ ID NO: 21058 - RNA, 20 nt, synthetic construct
  misc_feature 1..20: note = C9Orf72 CTCN PAM targeting sequence
  source 1..20: mol_type = other RNA
ggtcttctgattccaaattc

SEQ ID NO: 21059 - RNA, 20 nt, synthetic construct
  misc_feature 1..20: note = C9Orf72 CTCN PAM targeting sequence
  source 1..20: mol_type = other RNA
gctctgctacttctgtgttt

SEQ ID NO: 21060 - RNA, 20 nt, synthetic construct
  misc_feature 1..20: note = C9Orf72 CTCN PAM targeting sequence
  source 1..20: mol_type = other RNA
gctacttctgtgttttctgg

SEQ ID NO: 21061 - RNA, 20 nt, synthetic construct
  misc_feature 1..20: note = C9Orf72 CTCN PAM targeting sequence
  source 1..20: mol_type = other RNA
gagtcccagtctcttcataa

SEQ ID NO: 21062 - RNA, 20 nt, synthetic construct
  misc_feature 1..20: note = C9Orf72 CTCN PAM targeting sequence
  source 1..20: mol_type = other RNA
gagaagtcaagtgattttcc

SEQ ID NO: 21063 - RNA, 20 nt, synthetic construct
  misc_feature 1..20: note = C9Orf72 CTCN PAM targeting sequence
  source 1..20: mol_type = other RNA
tcataaaaaaaaaaaaaaaa

SEQ ID NO: 21064 - RNA, 20 nt, synthetic construct
  misc_feature 1..20: note = C9Orf72 CTCN PAM targeting sequence
  source 1..20: mol_type = other RNA
aaatgacattaactaaatca

SEQ ID NO: 21065 - RNA, 20 nt, synthetic construct
  misc_feature 1..20: note = C9Orf72 CTCN PAM targeting sequence
  source 1..20: mol_type = other RNA
ataaaggggtccaggaacca

SEQ ID NO: 21066 - RNA, 20 nt, synthetic construct
  misc_feature 1..20: note = C9Orf72 CTCN PAM targeting sequence
  source 1..20: mol_type = other RNA
caggcccttctaattctgtc

SEQ ID NO: 21067 - RNA, 20 nt, synthetic construct
  misc_feature 1..20: note = C9Orf72 CTCN PAM targeting sequence
  source 1..20: mol_type = other RNA
ctcctccaaaataaactgct

SEQ ID NO: 21068 - RNA, 20 nt, synthetic construct
  misc_feature 1..20: note = C9Orf72 CTCN PAM targeting sequence
  source 1..20: mol_type = other RNA
tccaaaataaactgcttttc

SEQ ID NO: 21069 - RNA, 20 nt, synthetic construct
  misc_feature 1..20: note = C9Orf72 CTCN PAM targeting sequence
  source 1..20: mol_type = other RNA
aaaataaactgcttttcagt

SEQ ID NO: 21070 - RNA, 20 nt, synthetic construct
  misc_feature 1..20: note = C9Orf72 CTCN PAM targeting sequence
  source 1..20: mol_type = other RNA
aaagaattccttggactgaa

SEQ ID NO: 21071 - RNA, 20 nt, synthetic construct
  misc_feature 1..20: note = C9Orf72 CTCN PAM targeting sequence
  source 1..20: mol_type = other RNA
ctaaagaattccttggactg

SEQ ID NO: 21072 - RNA, 20 nt, synthetic construct
  misc_feature 1..20: note = C9Orf72 CTCN PAM targeting sequence
  source 1..20: mol_type = other RNA
ctctaaagaattccttggac

SEQ ID NO: 21073 - RNA, 20 nt, synthetic construct
  misc_feature 1..20: note = C9Orf72 CTCN PAM targeting sequence
  source 1..20: mol_type = other RNA
gtgacacataatgaagcaaa

SEQ ID NO: 21074 - RNA, 20 nt, synthetic construct
  misc_feature 1..20: note = C9Orf72 CTCN PAM targeting sequence
  source 1..20: mol_type = other RNA
ccagaggaggctggggtgga

SEQ ID NO: 21075 - RNA, 20 nt, synthetic construct
  misc_feature 1..20: note = C9Orf72 CTCN PAM targeting sequence
  source 1..20: mol_type = other RNA
agaggaggctggggtggagg

SEQ ID NO: 21076 - RNA, 20 nt, synthetic construct
  misc_feature 1..20: note = C9Orf72 CTCN PAM targeting sequence
  source 1..20: mol_type = other RNA
ggagagtacttgctaaacct

SEQ ID NO: 21077 - RNA, 20 nt, synthetic construct
  misc_feature 1..20: note = C9Orf72 CTCN PAM targeting sequence
  source 1..20: mol_type = other RNA
tctggagagtacttgctaaa

SEQ ID NO: 21078 - RNA, 20 nt, synthetic construct
  misc_feature 1..20: note = C9Orf72 CTCN PAM targeting sequence
  source 1..20: mol_type = other RNA
accccagcctcctctggaga

SEQ ID NO: 21079 - RNA, 20 nt, synthetic construct
  misc_feature 1..20: note = C9Orf72 CTCN PAM targeting sequence
  source 1..20: mol_type = other RNA
cacatttttcctccacccca

SEQ ID NO: 21080 - RNA, 20 nt, synthetic construct
  misc_feature 1..20: note = C9Orf72 CTCN PAM targeting sequence
  source 1..20: mol_type = other RNA
cactctggaatgaaccagta

SEQ ID NO: 21081 - RNA, 20 nt, synthetic construct
  misc_feature 1..20: note = C9Orf72 CTCN PAM targeting sequence
  source 1..20: mol_type = other RNA
ggaatgaaccagtaaacaaa

SEQ ID NO: 21082 - RNA, 20 nt, synthetic construct
  misc_feature 1..20: note = C9Orf72 CTCN PAM targeting sequence
  source 1..20: mol_type = other RNA
gtcctagtaggaaaagaata

SEQ ID NO: 21083 - RNA, 20 nt, synthetic construct
  misc_feature 1..20: note = C9Orf72 CTCN PAM targeting sequence
  source 1..20: mol_type = other RNA
gtcaagtttccttctacagt

SEQ ID NO: 21084 - RNA, 20 nt, synthetic construct
  misc_feature 1..20: note = C9Orf72 CTCN PAM targeting sequence
  source 1..20: mol_type = other RNA
gaagtattctctgtcaagtt

SEQ ID NO: 21085 - RNA, 20 nt, synthetic construct
  misc_feature 1..20: note = C9Orf72 CTCN PAM targeting sequence
  source 1..20: mol_type = other RNA
ctgaagcaacacttaaccta

SEQ ID NO: 21086 - RNA, 20 nt, synthetic construct
  misc_feature 1..20: note = C9Orf72 CTCN PAM targeting sequence
  source 1..20: mol_type = other RNA
cttcttggaagtgaacaatt

SEQ ID NO: 21087 - RNA, 20 nt, synthetic construct
  misc_feature 1..20: note = C9Orf72 CTCN PAM targeting sequence
  source 1..20: mol_type = other RNA
tcacttcttggaagtgaaca

SEQ ID NO: 21088 - RNA, 20 nt, synthetic construct
  misc_feature 1..20: note = C9Orf72 CTCN PAM targeting sequence
  source 1..20: mol_type = other RNA
tatgacttctctttagaatt

SEQ ID NO: 21089 - RNA, 20 nt, synthetic construct
  misc_feature 1..20: note = C9Orf72 CTCN PAM targeting sequence
  source 1..20: mol_type = other RNA
ttagaatttgcattgctttt

SEQ ID NO: 21090 - RNA, 20 nt, synthetic construct
  misc_feature 1..20: note = C9Orf72 CTCN PAM targeting sequence
  source 1..20: mol_type = other RNA
ttggtaatttttattactaa

SEQ ID NO: 21091 - RNA, 20 nt, synthetic construct
  misc_feature 1..20: note = C9Orf72 CTCN PAM targeting sequence
  source 1..20: mol_type = other RNA
tgaaatagagggtattgtga

SEQ ID NO: 21092 - RNA, 20 nt, synthetic construct
  misc_feature 1..20: note = C9Orf72 CTCN PAM targeting sequence
  source 1..20: mol_type = other RNA
atttcaagagaaaccaatca

SEQ ID NO: 21093 - RNA, 20 nt, synthetic construct
  misc_feature 1..20: note = C9Orf72 CTCN PAM targeting sequence
  source 1..20: mol_type = other RNA
ggatacagatatagtgctga

SEQ ID NO: 21094 - RNA, 20 nt, synthetic construct
  misc_feature 1..20: note = C9Orf72 CTCN PAM targeting sequence
  source 1..20: mol_type = other RNA
tagtgcttcacaaagcacct

SEQ ID NO: 21095 - RNA, 20 nt, synthetic construct
  misc_feature 1..20: note = C9Orf72 CTCN PAM targeting sequence
  source 1..20: mol_type = other RNA
tctttgtcactcgtagtgct

SEQ ID NO: 21096 - RNA, 20 nt, synthetic construct
  misc_feature 1..20: note = C9Orf72 CTCN PAM targeting sequence
  source 1..20: mol_type = other RNA
cccagatatttgtgacaatc

SEQ ID NO: 21097 - RNA, 20 nt, synthetic construct
  misc_feature 1..20: note = C9Orf72 CTCN PAM targeting sequence
  source 1..20: mol_type = other RNA
ccctttatgtaggtccagaa

SEQ ID NO: 21098 - RNA, 20 nt, synthetic construct
  misc_feature 1..20: note = C9Orf72 CTCN PAM targeting sequence
  source 1..20: mol_type = other RNA
ttcctagacaactaaagagg

SEQ ID NO: 21099 - RNA, 20 nt, synthetic construct
  misc_feature 1..20: note = C9Orf72 CTCN PAM targeting sequence
  source 1..20: mol_type = other RNA
ttagttgtctaggaaagagg

SEQ ID NO: 21100 - RNA, 20 nt, synthetic construct
  misc_feature 1..20: note = C9Orf72 CTCN PAM targeting sequence
  source 1..20: mol_type = other RNA
gccacccaattcaataagaa

SEQ ID NO: 21101 - RNA, 20 nt, synthetic construct
  misc_feature 1..20: note = C9Orf72 CTCN PAM targeting sequence
  source 1..20: mol_type = other RNA
ctctgcctctccaagtcatc

SEQ ID NO: 21102 - RNA, 20 nt, synthetic construct
  misc_feature 1..20: note = C9Orf72 CTCN PAM targeting sequence
  source 1..20: mol_type = other RNA
ctgcctctccaagtcatcaa

SEQ ID NO: 21103 - RNA, 20 nt, synthetic construct
  misc_feature 1..20: note = C9Orf72 CTCN PAM targeting sequence
  source 1..20: mol_type = other RNA
gcctctccaagtcatcaaga

SEQ ID NO: 21104 - RNA, 20 nt, synthetic construct
  misc_feature 1..20: note = C9Orf72 CTCN PAM targeting sequence
  source 1..20: mol_type = other RNA
ccaagtcatcaagacccatt

SEQ ID NO: 21105 - RNA, 20 nt, synthetic construct
  misc_feature 1..20: note = C9Orf72 CTCN PAM targeting sequence
  source 1..20: mol_type = other RNA
aagtcatcaagacccattca

SEQ ID NO: 21106 - RNA, 20 nt, synthetic construct
  misc_feature 1..20: note = C9Orf72 CTCN PAM targeting sequence
  source 1..20: mol_type = other RNA
agccacactggacacttgca

SEQ ID NO: 21107 - RNA, 20 nt, synthetic construct
  misc_feature 1..20: note = C9Orf72 CTCN PAM targeting sequence
  source 1..20: mol_type = other RNA
gaacccggaccgttcaatgt

SEQ ID NO: 21108 - RNA, 20 nt, synthetic construct
  misc_feature 1..20: note = C9Orf72 CTCN PAM targeting sequence
  source 1..20: mol_type = other RNA
agctctcaatcatgtacttc

SEQ ID NO: 21109 - RNA, 20 nt, synthetic construct
  misc_feature 1..20: note = C9Orf72 CTCN PAM targeting sequence
  source 1..20: mol_type = other RNA
caatcatgtacttccttatt

SEQ ID NO: 21110 - RNA, 20 nt, synthetic construct
  misc_feature 1..20: note = C9Orf72 CTCN PAM targeting sequence
  source 1..20: mol_type = other RNA
atcatgtacttccttatttc

SEQ ID NO: 21111 - RNA, 20 nt, synthetic construct
  misc_feature 1..20: note = C9Orf72 CTCN PAM targeting sequence
  source 1..20: mol_type = other RNA
gtagagttggcggctccatt

SEQ ID NO: 21112 - RNA, 20 nt, synthetic construct
  misc_feature 1..20: note = C9Orf72 CTCN PAM targeting sequence
  source 1..20: mol_type = other RNA
acggagttgtttgcaatttg

SEQ ID NO: 21113 - RNA, 20 nt, synthetic construct
  misc_feature 1..20: note = C9Orf72 CTCN PAM targeting sequence
  source 1..20: mol_type = other RNA
attttacacttcctctgtct

SEQ ID NO: 21114 - RNA, 20 nt, synthetic construct
  misc_feature 1..20: note = C9Orf72 CTCN PAM targeting sequence
  source 1..20: mol_type = other RNA
gtcttcacattttattcctg

SEQ ID NO: 21115 - RNA, 20 nt, synthetic construct
  misc_feature 1..20: note = C9Orf72 CTCN PAM targeting sequence
  source 1..20: mol_type = other RNA
taaacacagcatacttactc

SEQ ID NO: 21116 - RNA, 20 nt, synthetic construct
  misc_feature 1..20: note = C9Orf72 CTCN PAM targeting sequence
  source 1..20: mol_type = other RNA
tactacagtttcctcaggct

SEQ ID NO: 21117 - RNA, 20 nt, synthetic construct
  misc_feature 1..20: note = C9Orf72 CTCN PAM targeting sequence
  source 1..20: mol_type = other RNA
ggcttgaaatttccctcctc

SEQ ID NO: 21118 - RNA, 20 nt, synthetic construct
  misc_feature 1..20: note = C9Orf72 CTCN PAM targeting sequence
  source 1..20: mol_type = other RNA
tcttccccatatttatatta

SEQ ID NO: 21119 - RNA, 20 nt, synthetic construct
  misc_feature 1..20: note = C9Orf72 CTCN PAM targeting sequence
  source 1..20: mol_type = other RNA
tccccatatttatattatga

SEQ ID NO: 21120 - RNA, 20 nt, synthetic construct
  misc_feature 1..20: note = C9Orf72 CTCN PAM targeting sequence
  source 1..20: mol_type = other RNA
gttttgttagatctgaatct

SEQ ID NO: 21121 - RNA, 20 nt, synthetic construct
  misc_feature 1..20: note = C9Orf72 CTCN PAM targeting sequence
  source 1..20: mol_type = other RNA
gtgggtatgttggatgagat

SEQ ID NO: 21122 - RNA, 20 nt, synthetic construct
  misc_feature 1..20: note = C9Orf72 CTCN PAM targeting sequence
  source 1..20: mol_type = other RNA
tccaacatacccacagagat

SEQ ID NO: 21123 - RNA, 20 nt, synthetic construct
  misc_feature 1..20: note = C9Orf72 CTCN PAM targeting sequence
  source 1..20: mol_type = other RNA
agtgcaatagaactgcaaat

SEQ ID NO: 21124 - RNA, 20 nt, synthetic construct
  misc_feature 1..20: note = C9Orf72 CTCN PAM targeting sequence
  source 1..20: mol_type = other RNA
ctagtgcaatagaactgcaa

SEQ ID NO: 21125 - RNA, 20 nt, synthetic construct
  misc_feature 1..20: note = C9Orf72 CTCN PAM targeting sequence
  source 1..20: mol_type = other RNA
tcgttcagacaattcaggca

SEQ ID NO: 21126 - RNA, 20 nt, synthetic construct
  misc_feature 1..20: note = C9Orf72 CTCN PAM targeting sequence
  source 1..20: mol_type = other RNA
attgttcttttttgctttcc

SEQ ID NO: 21127 - RNA, 20 nt, synthetic construct
  misc_feature 1..20: note = C9Orf72 CTCN PAM targeting sequence
  source 1..20: mol_type = other RNA
tacgaggagttggccaggtc

SEQ ID NO: 21128 - RNA, 20 nt, synthetic construct
  misc_feature 1..20: note = C9Orf72 CTCN PAM targeting sequence
  source 1..20: mol_type = other RNA
tggtcacagaatccaaccat

SEQ ID NO: 21129 - RNA, 20 nt, synthetic construct
  misc_feature 1..20: note = C9Orf72 CTCN PAM targeting sequence
  source 1..20: mol_type = other RNA
gcttcatggttggattctgt

SEQ ID NO: 21130 - RNA, 20 nt, synthetic construct
  misc_feature 1..20: note = C9Orf72 CTCN PAM targeting sequence
  source 1..20: mol_type = other RNA
ggcaatgcctgcttatttaa

SEQ ID NO: 21131 - RNA, 20 nt, synthetic construct
  misc_feature 1..20: note = C9Orf72 CTCN PAM targeting sequence
  source 1..20: mol_type = other RNA
agcaagaacataattaaata

SEQ ID NO: 21132 - RNA, 20 nt, synthetic construct
  misc_feature 1..20: note = C9Orf72 CTCN PAM targeting sequence
  source 1..20: mol_type = other RNA
ggaatttctcaagcaagaac

SEQ ID NO: 21133 - RNA, 20 nt, synthetic construct
  misc_feature 1..20: note = C9Orf72 CTCN PAM targeting sequence
  source 1..20: mol_type = other RNA
gccaataaacaataacattc

SEQ ID NO: 21134 - RNA, 20 nt, synthetic construct
  misc_feature 1..20: note = C9Orf72 CTCN PAM targeting sequence
  source 1..20: mol_type = other RNA
tcatataaattgtcaaagtt

SEQ ID NO: 21135 - RNA, 20 nt, synthetic construct
  misc_feature 1..20: note = C9Orf72 CTCN PAM targeting sequence
  source 1..20: mol_type = other RNA
tttatgcctttgtttttatt

SEQ ID NO: 21136 - RNA, 20 nt, synthetic construct
  misc_feature 1..20: note = C9Orf72 CTCN PAM targeting sequence
  source 1..20: mol_type = other RNA
gtttttgactaaaaaattgg

SEQ ID NO: 21137 - RNA, 20 nt, synthetic construct
  misc_feature 1..20: note = C9Orf72 CTCN PAM targeting sequence
  source 1..20: mol_type = other RNA
acatgttcttgctgactact

SEQ ID NO: 21138 - RNA, 20 nt, synthetic construct
  misc_feature 1..20: note = C9Orf72 CTCN PAM targeting sequence
  source 1..20: mol_type = other RNA
gtagtcagcaagaacatgtt

SEQ ID NO: 21139 - RNA, 20 nt, synthetic construct
  misc_feature 1..20: note = C9Orf72 CTCN PAM targeting sequence
  source 1..20: mol_type = other RNA
cagtagtcagcaagaacatg

SEQ ID NO: 21140 - RNA, 20 nt, synthetic construct
  misc_feature 1..20: note = C9Orf72 CTCN PAM targeting sequence
  source 1..20: mol_type = other RNA
ccagcctctcagtagtcagc

SEQ ID NO: 21141 - RNA, 20 nt, synthetic construct
  misc_feature 1..20: note = C9Orf72 CTCN PAM targeting sequence
  source 1..20: mol_type = other RNA
gtctcaatacgtatttgtca

SEQ ID NO: 21142 - RNA, 20 nt, synthetic construct
  misc_feature 1..20: note = C9Orf72 CTCN PAM targeting sequence
  source 1..20: mol_type = other RNA
atacgtatttgtcacttgtt

SEQ ID NO: 21143 - RNA, 20 nt, synthetic construct
  misc_feature 1..20: note = C9Orf72 CTCN PAM targeting sequence
  source 1..20: mol_type = other RNA
ataaataaaattaaagcaaa

SEQ ID NO: 21144 - RNA, 20 nt, synthetic construct
  misc_feature 1..20: note = C9Orf72 CTCN PAM targeting sequence
  source 1..20: mol_type = other RNA
aactatctgtgacagcagac

SEQ ID NO: 21145 - RNA, 20 nt, synthetic construct
  misc_feature 1..20: note = C9Orf72 CTCN PAM targeting sequence
  source 1..20: mol_type = other RNA
atacagcaaggaataaaatt

SEQ ID NO: 21146 - RNA, 20 nt, synthetic construct
  misc_feature 1..20: note = C9Orf72 CTCN PAM targeting sequence
  source 1..20: mol_type = other RNA
tgcctactccatacagcaag

SEQ ID NO: 21147 - RNA, 20 nt, synthetic construct
  misc_feature 1..20: note = C9Orf72 CTCN PAM targeting sequence
  source 1..20: mol_type = other RNA
aaccttagaatggattttga

SEQ ID NO: 21148 - RNA, 20 nt, synthetic construct
  misc_feature 1..20: note = C9Orf72 CTCN PAM targeting sequence
  source 1..20: mol_type = other RNA
tatcaaaatccattctaagg

SEQ ID NO: 21149 - RNA, 20 nt, synthetic construct
  misc_feature 1..20: note = C9Orf72 CTCN PAM targeting sequence
  source 1..20: mol_type = other RNA
gtgtttcctttctcctatca

SEQ ID NO: 21150 - RNA, 20 nt, synthetic construct
  misc_feature 1..20: note = C9Orf72 CTCN PAM targeting sequence
  source 1..20: mol_type = other RNA
gatttgcctgctgtatatca

SEQ ID NO: 21151 - RNA, 20 nt, synthetic construct
  misc_feature 1..20: note = C9Orf72 CTCN PAM targeting sequence
  source 1..20: mol_type = other RNA
caccttaatggcaccatgta

SEQ ID NO: 21152 - RNA, 20 nt, synthetic construct
  misc_feature 1..20: note = C9Orf72 CTCN PAM targeting sequence
  source 1..20: mol_type = other RNA
ccttaatggcaccatgtaat

SEQ ID NO: 21153 - RNA, 20 nt, synthetic construct
  misc_feature 1..20: note = C9Orf72 CTCN PAM targeting sequence
  source 1..20: mol_type = other RNA
cacagggtcctgtgcatatt

SEQ ID NO: 21154 - RNA, 20 nt, synthetic construct
  misc_feature 1..20: note = C9Orf72 CTCN PAM targeting sequence
  source 1..20: mol_type = other RNA
tcccgagtgactgggaagga

SEQ ID NO: 21155 - RNA, 20 nt, synthetic construct
  misc_feature 1..20: note = C9Orf72 CTCN PAM targeting sequence
  source 1..20: mol_type = other RNA
ggaagaggtcatttctttgt

SEQ ID NO: 21156 - RNA, 20 nt, synthetic construct
  misc_feature 1..20: note = C9Orf72 CTCN PAM targeting sequence
  source 1..20: mol_type = other RNA
tactatctttgatagacaaa

SEQ ID NO: 21157 - RNA, 20 nt, synthetic construct
  misc_feature 1..20: note = C9Orf72 CTCN PAM targeting sequence
  source 1..20: mol_type = other RNA
ttttgtgtattaaggaattt

SEQ ID NO: 21158 - RNA, 20 nt, synthetic construct
  misc_feature 1..20: note = C9Orf72 CTCN PAM targeting sequence
  source 1..20: mol_type = other RNA
aacaatactgcttctccttt

SEQ ID NO: 21159 - RNA, 20 nt, synthetic construct
  misc_feature 1..20: note = C9Orf72 CTCN PAM targeting sequence
  source 1..20: mol_type = other RNA
ctaaaatctgactaaatctt

SEQ ID NO: 21160 - RNA, 20 nt, synthetic construct
  misc_feature 1..20: note = C9Orf72 CTCN PAM targeting sequence
  source 1..20: mol_type = other RNA
aaaatctgactaaatcttgt

SEQ ID NO: 21161 - RNA, 20 nt, synthetic construct
  misc_feature 1..20: note = C9Orf72 CTCN PAM targeting sequence
  source 1..20: mol_type = other RNA
aatcttaactcatgaatttt

SEQ ID NO: 21162 - RNA, 20 nt, synthetic construct
  misc_feature 1..20: note = C9Orf72 CTCN PAM targeting sequence
  source 1..20: mol_type = other RNA
tgaattttgcagtctcttcg

SEQ ID NO: 21163 - RNA, 20 nt, synthetic construct
  misc_feature 1..20: note = C9Orf72 CTCN PAM targeting sequence
  source 1..20: mol_type = other RNA
tcgggagatgaatcatccac

SEQ ID NO: 21164 - RNA, 20 nt, synthetic construct
  misc_feature 1..20: note = C9Orf72 CTCN PAM targeting sequence
  source 1..20: mol_type = other RNA
cgaagagactgcaaaattca

SEQ ID NO: 21165 - RNA, 20 nt, synthetic construct
  misc_feature 1..20: note = C9Orf72 CTCN PAM targeting sequence
  source 1..20: mol_type = other RNA
atatttcaaaagtggatgat

SEQ ID NO: 21166 - RNA, 20 nt, synthetic construct
  misc_feature 1..20: note = C9Orf72 CTCN PAM targeting sequence
  source 1..20: mol_type = other RNA
gtattttaagaataacattg

SEQ ID NO: 21167 - RNA, 20 nt, synthetic construct
  misc_feature 1..20: note = C9Orf72 CTCN PAM targeting sequence
  source 1..20: mol_type = other RNA
aagacaaagcactctggtcc

SEQ ID NO: 21168 - RNA, 20 nt, synthetic construct
  misc_feature 1..20: note = C9Orf72 CTCN PAM targeting sequence
  source 1..20: mol_type = other RNA
gacttagataacataaattc

SEQ ID NO: 21169 - RNA, 20 nt, synthetic construct
  misc_feature 1..20: note = C9Orf72 CTCN PAM targeting sequence
  source 1..20: mol_type = other RNA
gtaatgctccatgattttta

SEQ ID NO: 21170 - RNA, 20 nt, synthetic construct
  misc_feature 1..20: note = C9Orf72 CTCN PAM targeting sequence
  source 1..20: mol_type = other RNA
atgatttttattcttaatgg

SEQ ID NO: 21171 - RNA, 20 nt, synthetic construct
  misc_feature 1..20: note = C9Orf72 CTCN PAM targeting sequence
  source 1..20: mol_type = other RNA
caggaaccattaagaataaa

SEQ ID NO: 21172 - RNA, 20 nt, synthetic construct
  misc_feature 1..20: note = C9Orf72 CTCN PAM targeting sequence
  source 1..20: mol_type = other RNA
actttttaatggctagaagc

SEQ ID NO: 21173 - RNA, 20 nt, synthetic construct
  misc_feature 1..20: note = C9Orf72 CTCN PAM targeting sequence
  source 1..20: mol_type = other RNA
caaggccatcgtctctttta

SEQ ID NO: 21174 - RNA, 20 nt, synthetic construct
  misc_feature 1..20: note = C9Orf72 CTCN PAM targeting sequence
  source 1..20: mol_type = other RNA
tatcccaataaaaatgttgt

SEQ ID NO: 21175 - RNA, 20 nt, synthetic construct
  misc_feature 1..20: note = C9Orf72 CTCN PAM targeting sequence
  source 1..20: mol_type = other RNA
gcacataaacctaataagaa

SEQ ID NO: 21176 - RNA, 20 nt, synthetic construct
  misc_feature 1..20: note = C9Orf72 CTCN PAM targeting sequence
  source 1..20: mol_type = other RNA
gaaactcagcacataaacct

SEQ ID NO: 21177 - RNA, 20 nt, synthetic construct
  misc_feature 1..20: note = C9Orf72 CTCN PAM targeting sequence
  source 1..20: mol_type = other RNA
ctacctgcaagattacatat

SEQ ID NO: 21178 - RNA, 20 nt, synthetic construct
  misc_feature 1..20: note = C9Orf72 CTCN PAM targeting sequence
  source 1..20: mol_type = other RNA
cattattgtttatataatcg

SEQ ID NO: 21179 - RNA, 20 nt, synthetic construct
  misc_feature 1..20: note = C9Orf72 CTCN PAM targeting sequence
  source 1..20: mol_type = other RNA
taagattcatatttaaatca

SEQ ID NO: 21180 - RNA, 20 nt, synthetic construct
  misc_feature 1..20: note = C9Orf72 CTCN PAM targeting sequence
  source 1..20: mol_type = other RNA
ggatagtgttttctaaataa

SEQ ID NO: 21181 - RNA, 20 nt, synthetic construct
  misc_feature 1..20: note = C9Orf72 CTCN PAM targeting sequence
  source 1..20: mol_type = other RNA
cactgaagcttaatggaatt

SEQ ID NO: 21182 - RNA, 20 nt, synthetic construct
  misc_feature 1..20: note = C9Orf72 CTCN PAM targeting sequence
  source 1..20: mol_type = other RNA
ttttcagtttaagtaactgc

SEQ ID NO: 21183 - RNA, 20 nt, synthetic construct
  misc_feature 1..20: note = C9Orf72 CTCN PAM targeting sequence
  source 1..20: mol_type = other RNA
tcaaaagtaattttgactga

SEQ ID NO: 21184 - RNA, 20 nt, synthetic construct
  misc_feature 1..20: note = C9Orf72 CTCN PAM targeting sequence
  source 1..20: mol_type = other RNA
cttcaaaagtaattttgact

SEQ ID NO: 21185 - RNA, 20 nt, synthetic construct
  misc_feature 1..20: note = C9Orf72 CTCN PAM targeting sequence
  source 1..20: mol_type = other RNA
tttgaaggcagaatcagccc

SEQ ID NO: 21186 - RNA, 20 nt, synthetic construct
  misc_feature 1..20: note = C9Orf72 CTCN PAM targeting sequence
  source 1..20: mol_type = other RNA
cttctaccttcagaatgtgg

SEQ ID NO: 21187 - RNA, 20 nt, synthetic construct
  misc_feature 1..20: note = C9Orf72 CTCN PAM targeting sequence
  source 1..20: mol_type = other RNA
ttaccttcccccaaaacctg

SEQ ID NO: 21188 - RNA, 20 nt, synthetic construct
  misc_feature 1..20: note = C9Orf72 CTCN PAM targeting sequence
  source 1..20: mol_type = other RNA
ctggatagacatttctcatt

SEQ ID NO: 21189 - RNA, 20 nt, synthetic construct
  misc_feature 1..20: note = C9Orf72 CTCN PAM targeting sequence
  source 1..20: mol_type = other RNA
ttgcaaatggagcatgtggt

SEQ ID NO: 21190 - RNA, 20 nt, synthetic construct
  misc_feature 1..20: note = C9Orf72 CTCN PAM targeting sequence
  source 1..20: mol_type = other RNA
atttgcaatgagaaatgtct

SEQ ID NO: 21191 - RNA, 20 nt, synthetic construct
  misc_feature 1..20: note = C9Orf72 CTCN PAM targeting sequence
  source 1..20: mol_type = other RNA
agattattttccaccaaggg

SEQ ID NO: 21192 - RNA, 20 nt, synthetic construct
  misc_feature 1..20: note = C9Orf72 CTCN PAM targeting sequence
  source 1..20: mol_type = other RNA
aaacatggttcctggaggag

SEQ ID NO: 21193 - RNA, 20 nt, synthetic construct
  misc_feature 1..20: note = C9Orf72 CTCN PAM targeting sequence
  source 1..20: mol_type = other RNA
aggaaccatgtttggagctt

SEQ ID NO: 21194 - RNA, 20 nt, synthetic construct
  misc_feature 1..20: note = C9Orf72 CTCN PAM targeting sequence
  source 1..20: mol_type = other RNA
tccaggaaccatgtttggag

SEQ ID NO: 21195 - RNA, 20 nt, synthetic construct
  misc_feature 1..20: note = C9Orf72 CTCN PAM targeting sequence
  source 1..20: mol_type = other RNA
tttccccccacctcctccag

SEQ ID NO: 21196 - RNA, 20 nt, synthetic construct
  misc_feature 1..20: note = C9Orf72 CTCN PAM targeting sequence
  source 1..20: mol_type = other RNA
tctcatgaacaggctccttg

SEQ ID NO: 21197 - RNA, 20 nt, synthetic construct
  misc_feature 1..20: note = C9Orf72 CTCN PAM targeting sequence
  source 1..20: mol_type = other RNA
tgaacaggctccttgtatcc

SEQ ID NO: 21198 - RNA, 20 nt, synthetic construct
  misc_feature 1..20: note = C9Orf72 CTCN PAM targeting sequence
  source 1..20: mol_type = other RNA
ttgtatcccccggaaacaat

SEQ ID NO: 21199 - RNA, 20 nt, synthetic construct
  misc_feature 1..20: note = C9Orf72 CTCN PAM targeting sequence
  source 1..20: mol_type = other RNA
gattggagcaagaggtggag

SEQ ID NO: 21200 - RNA, 20 nt, synthetic construct
  misc_feature 1..20: note = C9Orf72 CTCN PAM targeting sequence
  source 1..20: mol_type = other RNA
aatcagaggtccattgtttc

SEQ ID NO: 21201 - RNA, 20 nt, synthetic construct
  misc_feature 1..20: note = C9Orf72 CTCN PAM targeting sequence
  source 1..20: mol_type = other RNA
tgctccaatcagaggtccat

SEQ ID NO: 21202 - RNA, 20 nt, synthetic construct
  misc_feature 1..20: note = C9Orf72 CTCN PAM targeting sequence
  source 1..20: mol_type = other RNA
acctcttgctccaatcagag

SEQ ID NO: 21203 - RNA, 20 nt, synthetic construct
  misc_feature 1..20: note = C9Orf72 CTCN PAM targeting sequence
  source 1..20: mol_type = other RNA
tccacctcttgctccaatca

SEQ ID NO: 21204 - RNA, 20 nt, synthetic construct
  misc_feature 1..20: note = C9Orf72 CTCN PAM targeting sequence
  source 1..20: mol_type = other RNA
ctgctgaaaatgaagcaact

SEQ ID NO: 21205 - RNA, 20 nt, synthetic construct
  misc_feature 1..20: note = C9Orf72 CTCN PAM targeting sequence
  source 1..20: mol_type = other RNA
ccctgctgaaaatgaagcaa

SEQ ID NO: 21206 - RNA, 20 nt, synthetic construct
  misc_feature 1..20: note = C9Orf72 CTCN PAM targeting sequence
  source 1..20: mol_type = other RNA
gaaggtttaatatgacttct

SEQ ID NO: 21207 - RNA, 20 nt, synthetic construct
  misc_feature 1..20: note = C9Orf72 CTCN PAM targeting sequence
  source 1..20: mol_type = other RNA
acaaaggcaagacagatttt

SEQ ID NO: 21208 - RNA, 20 nt, synthetic construct
  misc_feature 1..20: note = C9Orf72 CTCN PAM targeting sequence
  source 1..20: mol_type = other RNA
tcctccacaaaggcaagaca

SEQ ID NO: 21209 - RNA, 20 nt, synthetic construct
  misc_feature 1..20: note = C9Orf72 CTCN PAM targeting sequence
  source 1..20: mol_type = other RNA
atgggaacaggaccgtagga

SEQ ID NO: 21210 - RNA, 20 nt, synthetic construct
  misc_feature 1..20: note = C9Orf72 CTCN PAM targeting sequence
  source 1..20: mol_type = other RNA
gacactgggtccctgtcacc

SEQ ID NO: 21211 - RNA, 20 nt, synthetic construct
  misc_feature 1..20: note = C9Orf72 CTCN PAM targeting sequence
  source 1..20: mol_type = other RNA
cagggcttctctgacactgg

SEQ ID NO: 21212 - RNA, 20 nt, synthetic construct
  misc_feature 1..20: note = C9Orf72 CTCN PAM targeting sequence
  source 1..20: mol_type = other RNA
tctttcattggtaatctgat

SEQ ID NO: 21213 - RNA, 20 nt, synthetic construct
  misc_feature 1..20: note = C9Orf72 CTCN PAM targeting sequence
  source 1..20: mol_type = other RNA
ttcattggtaatctgatggt

SEQ ID NO: 21214 - RNA, 20 nt, synthetic construct
  misc_feature 1..20: note = C9Orf72 CTCN PAM targeting sequence
  source 1..20: mol_type = other RNA
ggaccatcagattaccaatg

SEQ ID NO: 21215 - RNA, 20 nt, synthetic construct
  misc_feature 1..20: note = C9Orf72 CTCN PAM targeting sequence
  source 1..20: mol_type = other RNA
tgagcctcttcctcctcctc

SEQ ID NO: 21216 - RNA, 20 nt, synthetic construct
  misc_feature 1..20: note = C9Orf72 CTCN PAM targeting sequence
  source 1..20: mol_type = other RNA
agaggtccagggaatcctct

SEQ ID NO: 21217 - RNA, 20 nt, synthetic construct
  misc_feature 1..20: note = C9Orf72 CTCN PAM targeting sequence
  source 1..20: mol_type = other RNA
tcctcctcctcctgttagca

SEQ ID NO: 21218 - RNA, 20 nt, synthetic construct
  misc_feature 1..20: note = C9Orf72 CTCN PAM targeting sequence
  source 1..20: mol_type = other RNA
tcctcctgttagcaaagatg

SEQ ID NO: 21219 - RNA, 20 nt, synthetic construct
  misc_feature 1..20: note = C9Orf72 CTCN PAM targeting sequence
  source 1..20: mol_type = other RNA
tcctgttagcaaagatgaga

SEQ ID NO: 21220 - RNA, 20 nt, synthetic construct
  misc_feature 1..20: note = C9Orf72 CTCN PAM targeting sequence
  source 1..20: mol_type = other RNA
tgttagcaaagatgagagtc

SEQ ID NO: 21221 - RNA, 20 nt, synthetic construct
  misc_feature 1..20: note = C9Orf72 CTCN PAM targeting sequence
  source 1..20: mol_type = other RNA
tctttgctaacaggaggagg

SEQ ID NO: 21222 - RNA, 20 nt, synthetic construct
  misc_feature 1..20: note = C9Orf72 CTCN PAM targeting sequence
  source 1..20: mol_type = other RNA
catctttgctaacaggagga

SEQ ID NO: 21223 - RNA, 20 nt, synthetic construct
  misc_feature 1..20: note = C9Orf72 CTCN PAM targeting sequence
  source 1..20: mol_type = other RNA
gtgggccctcagagaaaagc

SEQ ID NO: 21224 - RNA, 20 nt, synthetic construct
  misc_feature 1..20: note = C9Orf72 CTCN PAM targeting sequence
  source 1..20: mol_type = other RNA
gagaaaagctcttgtttagg

SEQ ID NO: 21225 - RNA, 20 nt, synthetic construct
  misc_feature 1..20: note = C9Orf72 CTCN PAM targeting sequence
  source 1..20: mol_type = other RNA
gagggcccactgagactctc

SEQ ID NO: 21226 - RNA, 20 nt, synthetic construct
  misc_feature 1..20: note = C9Orf72 CTCN PAM targeting sequence
  source 1..20: mol_type = other RNA
tgtttaggatgaaggccgac

SEQ ID NO: 21227 - RNA, 20 nt, synthetic construct
  misc_feature 1..20: note = C9Orf72 CTCN PAM targeting sequence
  source 1..20: mol_type = other RNA
ccactgggtcggccttcatc

SEQ ID NO: 21228 - RNA, 20 nt, synthetic construct
  misc_feature 1..20: note = C9Orf72 CTCN PAM targeting sequence
  source 1..20: mol_type = other RNA
ctgccaaatgctgtatttgg

SEQ ID NO: 21229 - RNA, 20 nt, synthetic construct
  misc_feature 1..20: note = C9Orf72 CTCN PAM targeting sequence
  source 1..20: mol_type = other RNA
gccaaatgctgtatttggaa

SEQ ID NO: 21230 - RNA, 20 nt, synthetic construct
  misc_feature 1..20: note = C9Orf72 CTCN PAM targeting sequence
  source 1..20: mol_type = other RNA
gcttcagttaatttttgtct

SEQ ID NO: 21231 - RNA, 20 nt, synthetic construct
  misc_feature 1..20: note = C9Orf72 CTCN PAM targeting sequence
  source 1..20: mol_type = other RNA
caacagacaaaaattaactg

SEQ ID NO: 21232 - RNA, 20 nt, synthetic construct
  misc_feature 1..20: note = C9Orf72 CTCN PAM targeting sequence
  source 1..20: mol_type = other RNA
atggtttaaggaaagaaagt

SEQ ID NO: 21233 - RNA, 20 nt, synthetic construct
  misc_feature 1..20: note = C9Orf72 CTCN PAM targeting sequence
  source 1..20: mol_type = other RNA
tgggaaataatccatccttg

SEQ ID NO: 21234 - RNA, 20 nt, synthetic construct
  misc_feature 1..20: note = C9Orf72 CTCN PAM targeting sequence
  source 1..20: mol_type = other RNA
ccaactcttcttcaagatct

SEQ ID NO: 21235 - RNA, 20 nt, synthetic construct
  misc_feature 1..20: note = C9Orf72 CTCN PAM targeting sequence
  source 1..20: mol_type = other RNA
tcttcaagatctttggctca

SEQ ID NO: 21236 - RNA, 20 nt, synthetic construct
  misc_feature 1..20: note = C9Orf72 CTCN PAM targeting sequence
  source 1..20: mol_type = other RNA
ctttctataggtctccaact

SEQ ID NO: 21237 - RNA, 20 nt, synthetic construct
  misc_feature 1..20: note = C9Orf72 CTCN PAM targeting sequence
  source 1..20: mol_type = other RNA
aactcttcagtggcacggct

SEQ ID NO: 21238 - RNA, 20 nt, synthetic construct
  misc_feature 1..20: note = C9Orf72 CTCN PAM targeting sequence
  source 1..20: mol_type = other RNA
tcagtggcacggctgatctt

SEQ ID NO: 21239 - RNA, 20 nt, synthetic construct
  misc_feature 1..20: note = C9Orf72 CTCN PAM targeting sequence
  source 1..20: mol_type = other RNA
ggagtttcatttcattttct

SEQ ID NO: 21240 - RNA, 20 nt, synthetic construct
  misc_feature 1..20: note = C9Orf72 CTCN PAM targeting sequence
  source 1..20: mol_type = other RNA
agaggaaattaacagtagat

SEQ ID NO: 21241 - RNA, 20 nt, synthetic construct
  misc_feature 1..20: note = C9Orf72 CTCN PAM targeting sequence
  source 1..20: mol_type = other RNA
ctttcaaaatgtgtgttttc

SEQ ID NO: 21242 - RNA, 20 nt, synthetic construct
  misc_feature 1..20: note = C9Orf72 CTCN PAM targeting sequence
  source 1..20: mol_type = other RNA
gtaagctcttcctttatcaa

SEQ ID NO: 21243 - RNA, 20 nt, synthetic construct
  misc_feature 1..20: note = C9Orf72 CTCN PAM targeting sequence
  source 1..20: mol_type = other RNA
tcctttatcaacttcagata

SEQ ID NO: 21244 - RNA, 20 nt, synthetic construct
  misc_feature 1..20: note = C9Orf72 CTCN PAM targeting sequence
  source 1..20: mol_type = other RNA
aagcatagcagcctgatctt

SEQ ID NO: 21245 - RNA, 20 nt, synthetic construct
  misc_feature 1..20: note = C9Orf72 CTCN PAM targeting sequence
  source 1..20: mol_type = other RNA
gaacgcttgctaaaaatgaa

SEQ ID NO: 21246 - RNA, 20 nt, synthetic construct
  misc_feature 1..20: note = C9Orf72 CTCN PAM targeting sequence
  source 1..20: mol_type = other RNA
aaagtacatgcagaacaagt

SEQ ID NO: 21247 - RNA, 20 nt, synthetic construct
  misc_feature 1..20: note = C9Orf72 CTCN PAM targeting sequence
  source 1..20: mol_type = other RNA
cttgttctttccatacctca

SEQ ID NO: 21248 - RNA, 20 nt, synthetic construct
  misc_feature 1..20: note = C9Orf72 CTCN PAM targeting sequence
  source 1..20: mol_type = other RNA
gcttcttgcaaaagctgtct

SEQ ID NO: 21249 - RNA, 20 nt, synthetic construct
  misc_feature 1..20: note = C9Orf72 CTCN PAM targeting sequence
  source 1..20: mol_type = other RNA
cgttttcctggagttgagaa

SEQ ID NO: 21250 - RNA, 20 nt, synthetic construct
  misc_feature 1..20: note = C9Orf72 CTCN PAM targeting sequence
  source 1..20: mol_type = other RNA
ttttcctggagttgagaatt

SEQ ID NO: 21251 - RNA, 20 nt, synthetic construct
  misc_feature 1..20: note = C9Orf72 CTCN PAM targeting sequence
  source 1..20: mol_type = other RNA
aggaaaacgagagacagctt

SEQ ID NO: 21252 - RNA, 20 nt, synthetic construct
  misc_feature 1..20: note = C9Orf72 CTCN PAM targeting sequence
  source 1..20: mol_type = other RNA
actccaggaaaacgagagac

SEQ ID NO: 21253 - RNA, 20 nt, synthetic construct
  misc_feature 1..20: note = C9Orf72 CTCN PAM targeting sequence
  source 1..20: mol_type = other RNA
aatgacaagtagctgaagcc

SEQ ID NO: 21254 - RNA, 20 nt, synthetic construct
  misc_feature 1..20: note = C9Orf72 CTCN PAM targeting sequence
  source 1..20: mol_type = other RNA
tcttctagagactgtatcct

SEQ ID NO: 21255 - RNA, 20 nt, synthetic construct
  misc_feature 1..20: note = C9Orf72 CTCN PAM targeting sequence
  source 1..20: mol_type = other RNA
agaagatgagtcaaaatccc

SEQ ID NO: 21256 - RNA, 20 nt, synthetic construct
  misc_feature 1..20: note = C9Orf72 CTCN PAM targeting sequence
  source 1..20: mol_type = other RNA
tattttaactctttttctag

SEQ ID NO: 21257 - RNA, 20 nt, synthetic construct
  misc_feature 1..20: note = C9Orf72 CTCN PAM targeting sequence
  source 1..20: mol_type = other RNA
ttttctagacagagtatttc

SEQ ID NO: 21258 - RNA, 20 nt, synthetic construct
  misc_feature 1..20: note = C9Orf72 CTCN PAM targeting sequence
  source 1..20: mol_type = other RNA
gtctagaaaaagagttaaaa

SEQ ID NO: 21259 - RNA, 20 nt, synthetic construct
  misc_feature 1..20: note = C9Orf72 CTCN PAM targeting sequence
  source 1..20: mol_type = other RNA
agttcagaattggacctgtt

SEQ ID NO: 21260 - RNA, 20 nt, synthetic construct
  misc_feature 1..20: note = C9Orf72 CTCN PAM targeting sequence
  source 1..20: mol_type = other RNA
tcccacataaagccgactcc

SEQ ID NO: 21261 - RNA, 20 nt, synthetic construct
  misc_feature 1..20: note = C9Orf72 CTCN PAM targeting sequence
  source 1..20: mol_type = other RNA
caaccgatctaaaacttctc

SEQ ID NO: 21262 - RNA, 20 nt, synthetic construct
  misc_feature 1..20: note = C9Orf72 CTCN PAM targeting sequence
  source 1..20: mol_type = other RNA
ttttttgtgtggagaagttt

SEQ ID NO: 21263 - RNA, 20 nt, synthetic construct
  misc_feature 1..20: note = C9Orf72 CTCN PAM targeting sequence
  source 1..20: mol_type = other RNA
catggaaaaccataaggatt

SEQ ID NO: 21264 - RNA, 20 nt, synthetic construct
  misc_feature 1..20: note = C9Orf72 CTCN PAM targeting sequence
  source 1..20: mol_type = other RNA
aatccttatggttttccatg

SEQ ID NO: 21265 - RNA, 20 nt, synthetic construct
  misc_feature 1..20: note = C9Orf72 CTCN PAM targeting sequence
  source 1..20: mol_type = other RNA
cactttcaggcagtgctgcc

SEQ ID NO: 21266 - RNA, 20 nt, synthetic construct
  misc_feature 1..20: note = C9Orf72 CTCN PAM targeting sequence
  source 1..20: mol_type = other RNA
cccaggaccagccccaaata

SEQ ID NO: 21267 - RNA, 20 nt, synthetic construct
  misc_feature 1..20: note = C9Orf72 CTCN PAM targeting sequence
  source 1..20: mol_type = other RNA
gcggtatttggggctggtcc

SEQ ID NO: 21268 - RNA, 20 nt, synthetic construct
  misc_feature 1..20: note = C9Orf72 CTCN PAM targeting sequence
  source 1..20: mol_type = other RNA
tccacagcggggaaggctgc

SEQ ID NO: 21269 - RNA, 20 nt, synthetic construct
  misc_feature 1..20: note = C9Orf72 CTCN PAM targeting sequence
  source 1..20: mol_type = other RNA
acagcggggaaggctgctcc

SEQ ID NO: 21270 - RNA, 20 nt, synthetic construct
  misc_feature 1..20: note = C9Orf72 CTCN PAM targeting sequence
  source 1..20: mol_type = other RNA
ggcggttgccacaataaact

SEQ ID NO: 21271 - RNA, 20 nt, synthetic construct
  misc_feature 1..20: note = C9Orf72 CTCN PAM targeting sequence
  source 1..20: mol_type = other RNA
gccgcccacagcccaagttt

SEQ ID NO: 21272 - RNA, 20 nt, synthetic construct
  misc_feature 1..20: note = C9Orf72 CTCN PAM targeting sequence
  source 1..20: mol_type = other RNA
gtttgccacgtgcggattcg

SEQ ID NO: 21273 - RNA, 20 nt, synthetic construct
  misc_feature 1..20: note = C9Orf72 CTCN PAM targeting sequence
  source 1..20: mol_type = other RNA
caagtctaaaccaggaagaa

SEQ ID NO: 21274 - RNA, 20 nt, synthetic construct
  misc_feature 1..20: note = C9Orf72 CTCN PAM targeting sequence
  source 1..20: mol_type = other RNA
ctgatggtagtttgtatttc

SEQ ID NO: 21275 - RNA, 20 nt, synthetic construct
  misc_feature 1..20: note = C9Orf72 CTCN PAM targeting sequence
  source 1..20: mol_type = other RNA
gatggtagtttgtatttctg

SEQ ID NO: 21276 - RNA, 20 nt, synthetic construct
  misc_feature 1..20: note = C9Orf72 CTCN PAM targeting sequence
  source 1..20: mol_type = other RNA
actgtcaatattagacagat

SEQ ID NO: 21277 - RNA, 20 nt, synthetic construct
  misc_feature 1..20: note = C9Orf72 CTCN PAM targeting sequence
  source 1..20: mol_type = other RNA
cattattattgtgtgggagt

SEQ ID NO: 21278 - RNA, 20 nt, synthetic construct
  misc_feature 1..20: note = C9Orf72 CTCN PAM targeting sequence
  source 1..20: mol_type = other RNA
cacacaataataatgggaga

SEQ ID NO: 21279 - RNA, 20 nt, synthetic construct
  misc_feature 1..20: note = C9Orf72 CTCN PAM targeting sequence
  source 1..20: mol_type = other RNA
ttgtaggtctctaagaactt

SEQ ID NO: 21280 - RNA, 20 nt, synthetic construct
  misc_feature 1..20: note = C9Orf72 CTCN PAM targeting sequence
  source 1..20: mol_type = other RNA
aagaacttgctttatgaatc

SEQ ID NO: 21281 - RNA, 20 nt, synthetic construct
  misc_feature 1..20: note = C9Orf72 CTCN PAM targeting sequence
  source 1..20: mol_type = other RNA
tgtattgggtgcatatatat

SEQ ID NO: 21282 - RNA, 20 nt, synthetic construct
  misc_feature 1..20: note = C9Orf72 CTCN PAM targeting sequence
  source 1..20: mol_type = other RNA
aaataaagggatggaggaat

SEQ ID NO: 21283 - RNA, 20 nt, synthetic construct
  misc_feature 1..20: note = C9Orf72 CTCN PAM targeting sequence
  source 1..20: mol_type = other RNA
catgaaaagacacacatagg

SEQ ID NO: 21284 - RNA, 20 nt, synthetic construct
  misc_feature 1..20: note = C9Orf72 CTCN PAM targeting sequence
  source 1..20: mol_type = other RNA
tgaatatagcacactgatgg

SEQ ID NO: 21285 - RNA, 20 nt, synthetic construct
  misc_feature 1..20: note = C9Orf72 CTCN PAM targeting sequence
  source 1..20: mol_type = other RNA
ttatacaggtggccagtctg

SEQ ID NO: 21286 - RNA, 20 nt, synthetic construct
  misc_feature 1..20: note = C9Orf72 CTCN PAM targeting sequence
  source 1..20: mol_type = other RNA
agtctgggtgacagagggag

SEQ ID NO: 21287 - RNA, 20 nt, synthetic construct
  misc_feature 1..20: note = C9Orf72 CTCN PAM targeting sequence
  source 1..20: mol_type = other RNA
ctgcagcctcaacctctcca

SEQ ID NO: 21288 - RNA, 20 nt, synthetic construct
  misc_feature 1..20: note = C9Orf72 CTCN PAM targeting sequence
  source 1..20: mol_type = other RNA
acctctccagctcaagtgat

SEQ ID NO: 21289 - RNA, 20 nt, synthetic construct
  misc_feature 1..20: note = C9Orf72 CTCN PAM targeting sequence
  source 1..20: mol_type = other RNA
ccagctcaagtgatcctccc

SEQ ID NO: 21290 - RNA, 20 nt, synthetic construct
  misc_feature 1..20: note = C9Orf72 CTCN PAM targeting sequence
  source 1..20: mol_type = other RNA
agctcaagtgatcctcccac

SEQ ID NO: 21291 - RNA, 20 nt, synthetic construct
  misc_feature 1..20: note = C9Orf72 CTCN PAM targeting sequence
  source 1..20: mol_type = other RNA
agtgatcctcccacctcagc

SEQ ID NO: 21292 - RNA, 20 nt, synthetic construct
  misc_feature 1..20: note = C9Orf72 CTCN PAM targeting sequence
  source 1..20: mol_type = other RNA
cacctcagcttcctgaatag

SEQ ID NO: 21293 - RNA, 20 nt, synthetic construct
  misc_feature 1..20: note = C9Orf72 CTCN PAM targeting sequence
  source 1..20: mol_type = other RNA
gcttcctgaatagctggacc

SEQ ID NO: 21294 - RNA, 20 nt, synthetic construct
  misc_feature 1..20: note = C9Orf72 CTCN PAM targeting sequence
  source 1..20: mol_type = other RNA
acaaaatataaaaatacatt

SEQ ID NO: 21295 - RNA, 20 nt, synthetic construct
  misc_feature 1..20: note = C9Orf72 CTCN PAM targeting sequence
  source 1..20: mol_type = other RNA
ttgcattgcccaggctggtc

SEQ ID NO: 21296 - RNA, 20 nt, synthetic construct
  misc_feature 1..20: note = C9Orf72 CTCN PAM targeting sequence
  source 1..20: mol_type = other RNA
agctcctgggctcacgtgat

SEQ ID NO: 21297 - RNA, 20 nt, synthetic construct
  misc_feature 1..20: note = C9Orf72 CTCN PAM targeting sequence
  source 1..20: mol_type = other RNA
agaccagcctgggcaatgca

SEQ ID NO: 21298 - RNA, 20 nt, synthetic construct
  misc_feature 1..20: note = C9Orf72 CTCN PAM targeting sequence
  source 1..20: mol_type = other RNA
tgggctcacgtgatcctccc

SEQ ID NO: 21299 - RNA, 20 nt, synthetic construct
  misc_feature 1..20: note = C9Orf72 CTCN PAM targeting sequence
  source 1..20: mol_type = other RNA
cgtgatcctcccgcttcagc

SEQ ID NO: 21300 - RNA, 20 nt, synthetic construct
  misc_feature 1..20: note = C9Orf72 CTCN PAM targeting sequence
  source 1..20: mol_type = other RNA
cgcttcagcttcccaaagtg

SEQ ID NO: 21301 - RNA, 20 nt, synthetic construct
  misc_feature 1..20: note = C9Orf72 CTCN PAM targeting sequence
  source 1..20: mol_type = other RNA
tagattttatttcaagttgc

SEQ ID NO: 21302 - RNA, 20 nt, synthetic construct
  misc_feature 1..20: note = C9Orf72 CTCN PAM targeting sequence
  source 1..20: mol_type = other RNA
ttttcctagtgaatctttgt

SEQ ID NO: 21303 - RNA, 20 nt, synthetic construct
  misc_feature 1..20: note = C9Orf72 CTCN PAM targeting sequence
  source 1..20: mol_type = other RNA
tccttttcctagtgaatctt

SEQ ID NO: 21304 - RNA, 20 nt, synthetic construct
  misc_feature 1..20: note = C9Orf72 CTCN PAM targeting sequence
  source 1..20: mol_type = other RNA
gctcctccttttcctagtga

SEQ ID NO: 21305 - RNA, 20 nt, synthetic construct
  misc_feature 1..20: note = C9Orf72 CTCN PAM targeting sequence
  source 1..20: mol_type = other RNA
gattgcttccctctgctcct

SEQ ID NO: 21306 - RNA, 20 nt, synthetic construct
  misc_feature 1..20: note = C9Orf72 CTCN PAM targeting sequence
  source 1..20: mol_type = other RNA
tttgcctttcatttgtctat

SEQ ID NO: 21307 - RNA, 20 nt, synthetic construct
  misc_feature 1..20: note = C9Orf72 CTCN PAM targeting sequence
  source 1..20: mol_type = other RNA
tgaggaaataaaaaaagaga

SEQ ID NO: 21308 - RNA, 20 nt, synthetic construct
  misc_feature 1..20: note = C9Orf72 CTCN PAM targeting sequence
  source 1..20: mol_type = other RNA
tgagatctacaatgtaagtg

SEQ ID NO: 21309 - RNA, 20 nt, synthetic construct
  misc_feature 1..20: note = C9Orf72 CTCN PAM targeting sequence
  source 1..20: mol_type = other RNA
ttttttatttcctcatgaga

SEQ ID NO: 21310 - RNA, 20 nt, synthetic construct
  misc_feature 1..20: note = C9Orf72 CTCN PAM targeting sequence
  source 1..20: mol_type = other RNA
acaggcccttgtctatacaa

SEQ ID NO: 21311 - RNA, 20 nt, synthetic construct
  misc_feature 1..20: note = C9Orf72 CTCN PAM targeting sequence
  source 1..20: mol_type = other RNA
atgaaactgtgaccttgtat

SEQ ID NO: 21312 - RNA, 20 nt, synthetic construct
  misc_feature 1..20: note = C9Orf72 CTCN PAM targeting sequence
  source 1..20: mol_type = other RNA
acaagattcaatttatattt

SEQ ID NO: 21313 - RNA, 20 nt, synthetic construct
  misc_feature 1..20: note = C9Orf72 CTCN PAM targeting sequence
  source 1..20: mol_type = other RNA
aatagcaaagcagaggataa

SEQ ID NO: 21314 - RNA, 20 nt, synthetic construct
  misc_feature 1..20: note = C9Orf72 CTCN PAM targeting sequence
  source 1..20: mol_type = other RNA
gctttgctattagagaagat

SEQ ID NO: 21315 - RNA, 20 nt, synthetic construct
  misc_feature 1..20: note = C9Orf72 CTCN PAM targeting sequence
  source 1..20: mol_type = other RNA
ttattttgccactaaacaag

SEQ ID NO: 21316 - RNA, 20 nt, synthetic construct
  misc_feature 1..20: note = C9Orf72 CTCN PAM targeting sequence
  source 1..20: mol_type = other RNA
tgggaatatgtgttaagaac

SEQ ID NO: 21317 - RNA, 20 nt, synthetic construct
  misc_feature 1..20: note = C9Orf72 CTCN PAM targeting sequence
  source 1..20: mol_type = other RNA
ttctgttcttaacacatatt

SEQ ID NO: 21318 - RNA, 20 nt, synthetic construct
  misc_feature 1..20: note = C9Orf72 CTCN PAM targeting sequence
  source 1..20: mol_type = other RNA
aaagatgtcatggttttgca

SEQ ID NO: 21319 - RNA, 20 nt, synthetic construct
  misc_feature 1..20: note = C9Orf72 CTCN PAM targeting sequence
  source 1..20: mol_type = other RNA
acccgctttggccttttaat

SEQ ID NO: 21320 - RNA, 20 nt, synthetic construct
  misc_feature 1..20: note = C9Orf72 CTCN PAM targeting sequence
  source 1..20: mol_type = other RNA
tttttctaggacaagttggc

SEQ ID NO: 21321 - RNA, 20 nt, synthetic construct
  misc_feature 1..20: note = C9Orf72 CTCN PAM targeting sequence
  source 1..20: mol_type = other RNA
ttgaatgtcattaaaaatag

SEQ ID NO: 21322 - RNA, 20 nt, synthetic construct
  misc_feature 1..20: note = C9Orf72 CTCN PAM targeting sequence
  source 1..20: mol_type = other RNA
atatcattacaacatgcctc

SEQ ID NO: 21323 - RNA, 20 nt, synthetic construct
  misc_feature 1..20: note = C9Orf72 CTCN PAM targeting sequence
  source 1..20: mol_type = other RNA
caaagccattcctcaatatc

SEQ ID NO: 21324 - RNA, 20 nt, synthetic construct
  misc_feature 1..20: note = C9Orf72 CTCN PAM targeting sequence
  source 1..20: mol_type = other RNA
gtgttaggcacctgctctgg

SEQ ID NO: 21325 - RNA, 20 nt, synthetic construct
  misc_feature 1..20: note = C9Orf72 CTCN PAM targeting sequence
  source 1..20: mol_type = other RNA
ggggtggcagtttgtttctc

SEQ ID NO: 21326 - RNA, 20 nt, synthetic construct
  misc_feature 1..20: note = C9Orf72 CTCN PAM targeting sequence
  source 1..20: mol_type = other RNA
ggatttccgtggtctgtgtg

SEQ ID NO: 21327 - RNA, 20 nt, synthetic construct
  misc_feature 1..20: note = C9Orf72 CTCN PAM targeting sequence
  source 1..20: mol_type = other RNA
taccacaaattgtgtatact

SEQ ID NO: 21328 - RNA, 20 nt, synthetic construct
  misc_feature 1..20: note = C9Orf72 CTCN PAM targeting sequence
  source 1..20: mol_type = other RNA
ttatttaacaagaaaactat

SEQ ID NO: 21329 - RNA, 20 nt, synthetic construct
  misc_feature 1..20: note = C9Orf72 CTCN PAM targeting sequence
  source 1..20: mol_type = other RNA
gataaaacatctcaggaatg

SEQ ID NO: 21330 - RNA, 20 nt, synthetic construct
  misc_feature 1..20: note = C9Orf72 CTCN PAM targeting sequence
  source 1..20: mol_type = other RNA
ggaatgctcatgtgattctg

SEQ ID NO: 21331 - RNA, 20 nt, synthetic construct
  misc_feature 1..20: note = C9Orf72 CTCN PAM targeting sequence
  source 1..20: mol_type = other RNA
tgtgattctgagggtgagaa

SEQ ID NO: 21332 - RNA, 20 nt, synthetic construct
  misc_feature 1..20: note = C9Orf72 CTCN PAM targeting sequence
  source 1..20: mol_type = other RNA
gaatcacatgagcattcctg

SEQ ID NO: 21333 - RNA, 20 nt, synthetic construct
  misc_feature 1..20: note = C9Orf72 CTCN PAM targeting sequence
  source 1..20: mol_type = other RNA
ccctcagaatcacatgagca

SEQ ID NO: 21334 - RNA, 20 nt, synthetic construct
  misc_feature 1..20: note = C9Orf72 CTCN PAM targeting sequence
  source 1..20: mol_type = other RNA
tcgttgccgttggacacagc

SEQ ID NO: 21335 - RNA, 20 nt, synthetic construct
  misc_feature 1..20: note = C9Orf72 CTCN PAM targeting sequence
  source 1..20: mol_type = other RNA
ccctgaaggctggcaaggat

SEQ ID NO: 21336 - RNA, 20 nt, synthetic construct
  misc_feature 1..20: note = C9Orf72 CTCN PAM targeting sequence
  source 1..20: mol_type = other RNA
catccttgccagccttcagg

SEQ ID NO: 21337 - RNA, 20 nt, synthetic construct
  misc_feature 1..20: note = C9Orf72 CTCN PAM targeting sequence
  source 1..20: mol_type = other RNA
taagcactagcattctactg

SEQ ID NO: 21338 - RNA, 20 nt, synthetic construct
  misc_feature 1..20: note = C9Orf72 CTCN PAM targeting sequence
  source 1..20: mol_type = other RNA
agattcacctttgttagtac

SEQ ID NO: 21339 - RNA, 20 nt, synthetic construct
  misc_feature 1..20: note = C9Orf72 CTCN PAM targeting sequence
  source 1..20: mol_type = other RNA
cttgtataattggccataac

SEQ ID NO: 21340 - RNA, 20 nt, synthetic construct
  misc_feature 1..20: note = C9Orf72 CTCN PAM targeting sequence
  source 1..20: mol_type = other RNA
ttgctgtagtatattatatc

SEQ ID NO: 21341 - RNA, 20 nt, synthetic construct
  misc_feature 1..20: note = C9Orf72 CTCN PAM targeting sequence
  source 1..20: mol_type = other RNA
tcccatcaacaataagactt

SEQ ID NO: 21342 - RNA, 20 nt, synthetic construct
  misc_feature 1..20: note = C9Orf72 CTCN PAM targeting sequence
  source 1..20: mol_type = other RNA
gattacctgtggctcttccc

SEQ ID NO: 21343 - RNA, 20 nt, synthetic construct
  misc_feature 1..20: note = C9Orf72 CTCN PAM targeting sequence
  source 1..20: mol_type = other RNA
tcccttttgagatgcttcat

SEQ ID NO: 21344 - RNA, 20 nt, synthetic construct
  misc_feature 1..20: note = C9Orf72 CTCN PAM targeting sequence
  source 1..20: mol_type = other RNA
aaagggaagagccacaggta

SEQ ID NO: 21345 - RNA, 20 nt, synthetic construct
  misc_feature 1..20: note = C9Orf72 CTCN PAM targeting sequence
  source 1..20: mol_type = other RNA
taaaaaaggaaaatactctc

SEQ ID NO: 21346 - RNA, 20 nt, synthetic construct
  misc_feature 1..20: note = C9Orf72 CTCN PAM targeting sequence
  source 1..20: mol_type = other RNA
agttttatctgtttctaagt

SEQ ID NO: 21347 - RNA, 20 nt, synthetic construct
  misc_feature 1..20: note = C9Orf72 CTCN PAM targeting sequence
  source 1..20: mol_type = other RNA
aacccttattttagtaaaag

SEQ ID NO: 21348 - RNA, 20 nt, synthetic construct
  misc_feature 1..20: note = C9Orf72 CTCN PAM targeting sequence
  source 1..20: mol_type = other RNA
aaggaaggcttcttagatct

SEQ ID NO: 21349 - RNA, 20 nt, synthetic construct
  misc_feature 1..20: note = C9Orf72 CTCN PAM targeting sequence
  source 1..20: mol_type = other RNA
aagcatggaatgcatgagtt

SEQ ID NO: 21350 - RNA, 20 nt, synthetic construct
  misc_feature 1..20: note = C9Orf72 CTCN PAM targeting sequence
  source 1..20: mol_type = other RNA
tgcattccatgctttgagga

SEQ ID NO: 21351 - RNA, 20 nt, synthetic construct
  misc_feature 1..20: note = C9Orf72 CTCN PAM targeting sequence
  source 1..20: mol_type = other RNA
atcagacagtagccagatga

SEQ ID NO: 21352 - RNA, 20 nt, synthetic construct
  misc_feature 1..20: note = C9Orf72 CTCN PAM targeting sequence
  source 1..20: mol_type = other RNA
tcagctatcaacaatatggc

SEQ ID NO: 21353 - RNA, 20 nt, synthetic construct
  misc_feature 1..20: note = C9Orf72 CTCN PAM targeting sequence
  source 1..20: mol_type = other RNA
gcatcttgaagccctttcac

SEQ ID NO: 21354 - RNA, 20 nt, synthetic construct
  misc_feature 1..20: note = C9Orf72 CTCN PAM targeting sequence
  source 1..20: mol_type = other RNA
tctgtctctgcctgtctccc

SEQ ID NO: 21355 - RNA, 20 nt, synthetic construct
  misc_feature 1..20: note = C9Orf72 CTCN PAM targeting sequence
  source 1..20: mol_type = other RNA
gcctgtctcccagcctctga

SEQ ID NO: 21356 - RNA, 20 nt, synthetic construct
  misc_feature 1..20: note = C9Orf72 CTCN PAM targeting sequence
  source 1..20: mol_type = other RNA
cagcctctgaggtcctgtct

SEQ ID NO: 21357 - RNA, 20 nt, synthetic construct
  misc_feature 1..20: note = C9Orf72 CTCN PAM targeting sequence
  source 1..20: mol_type = other RNA
gaggtcctgtctctcccgtg

SEQ ID NO: 21358 - RNA, 20 nt, synthetic construct
  misc_feature 1..20: note = C9Orf72 CTCN PAM targeting sequence
  source 1..20: mol_type = other RNA
aagagagctccagggaccag

SEQ ID NO: 21359 - RNA, 20 nt, synthetic construct
  misc_feature 1..20: note = C9Orf72 CTCN PAM targeting sequence
  source 1..20: mol_type = other RNA
ttgagtagcaggcttctgga

SEQ ID NO: 21360 - RNA, 20 nt, synthetic construct
  misc_feature 1..20: note = C9Orf72 CTCN PAM targeting sequence
  source 1..20: mol_type = other RNA
ctttgagtagcaggcttctg

SEQ ID NO: 21361 - RNA, 20 nt, synthetic construct
  misc_feature 1..20: note = C9Orf72 CTCN PAM targeting sequence
  source 1..20: mol_type = other RNA
agggaccagcagtgtcagca

SEQ ID NO: 21362 - RNA, 20 nt, synthetic construct
  misc_feature 1..20: note = C9Orf72 CTCN PAM targeting sequence
  source 1..20: mol_type = other RNA
tgttaagcatgtagtatctt

SEQ ID NO: 21363 - RNA, 20 nt, synthetic construct
  misc_feature 1..20: note = C9Orf72 CTCN PAM targeting sequence
  source 1..20: mol_type = other RNA
actctttccttactttatca

SEQ ID NO: 21364 - RNA, 20 nt, synthetic construct
  misc_feature 1..20: note = C9Orf72 CTCN PAM targeting sequence
  source 1..20: mol_type = other RNA
ttccttactttatcatctca

SEQ ID NO: 21365 - RNA, 20 nt, synthetic construct
  misc_feature 1..20: note = C9Orf72 CTCN PAM targeting sequence
  source 1..20: mol_type = other RNA
tcttagatggcccaaagcag

SEQ ID NO: 21366 - RNA, 20 nt, synthetic construct
  misc_feature 1..20: note = C9Orf72 CTCN PAM targeting sequence
  source 1..20: mol_type = other RNA
ttaataattgatcaacacct

SEQ ID NO: 21367 - RNA, 20 nt, synthetic construct
  misc_feature 1..20: note = C9Orf72 CTCN PAM targeting sequence
  source 1..20: mol_type = other RNA
gagacctattgggaaagcaa

SEQ ID NO: 21368 - RNA, 20 nt, synthetic construct
  misc_feature 1..20: note = C9Orf72 CTCN PAM targeting sequence
  source 1..20: mol_type = other RNA
ttatatattcaagatgttaa

SEQ ID NO: 21369 - RNA, 20 nt, synthetic construct
  misc_feature 1..20: note = C9Orf72 CTCN PAM targeting sequence
  source 1..20: mol_type = other RNA
tataaatcaataagaaaaag

SEQ ID NO: 21370 - RNA, 20 nt, synthetic construct
  misc_feature 1..20: note = C9Orf72 CTCN PAM targeting sequence
  source 1..20: mol_type = other RNA
agagctgaaaagcagaggat

SEQ ID NO: 21371 - RNA, 20 nt, synthetic construct
  misc_feature 1..20: note = C9Orf72 CTCN PAM targeting sequence
  source 1..20: mol_type = other RNA
tgagctgttatctttttctt

SEQ ID NO: 21372 - RNA, 20 nt, synthetic construct
  misc_feature 1..20: note = C9Orf72 CTCN PAM targeting sequence
  source 1..20: mol_type = other RNA
gcttttcagctcttgagctg

SEQ ID NO: 21373 - RNA, 20 nt, synthetic construct
  misc_feature 1..20: note = C9Orf72 CTCN PAM targeting sequence
  source 1..20: mol_type = other RNA
ttctgtgaactacctgttca

SEQ ID NO: 21374 - RNA, 20 nt, synthetic construct
  misc_feature 1..20: note = C9Orf72 CTCN PAM targeting sequence
  source 1..20: mol_type = other RNA
ctagtaattggaaaaatgca

SEQ ID NO: 21375 - RNA, 20 nt, synthetic construct
  misc_feature 1..20: note = C9Orf72 CTCN PAM targeting sequence
  source 1..20: mol_type = other RNA
aacagtttagattcacatca

SEQ ID NO: 21376 - RNA, 20 nt, synthetic construct
  misc_feature 1..20: note = C9Orf72 CTCN PAM targeting sequence
  source 1..20: mol_type = other RNA
cattgatagacacttaggac

SEQ ID NO: 21377 - RNA, 20 nt, synthetic construct
  misc_feature 1..20: note = C9Orf72 CTCN PAM targeting sequence
  source 1..20: mol_type = other RNA
gcaatgagttgtggctgggc

SEQ ID NO: 21378 - RNA, 20 nt, synthetic construct
  misc_feature 1..20: note = C9Orf72 CTCN PAM targeting sequence
  source 1..20: mol_type = other RNA
ttgcagagtagtccaaaata

SEQ ID NO: 21379 - RNA, 20 nt, synthetic construct
  misc_feature 1..20: note = C9Orf72 CTCN PAM targeting sequence
  source 1..20: mol_type = other RNA
ttgaaccacaatttcctcat

SEQ ID NO: 21380 - RNA, 20 nt, synthetic construct
  misc_feature 1..20: note = C9Orf72 CTCN PAM targeting sequence
  source 1..20: mol_type = other RNA
tttaacagttccccagggtg

SEQ ID NO: 21381 - RNA, 20 nt, synthetic construct
  misc_feature 1..20: note = C9Orf72 CTCN PAM targeting sequence
  source 1..20: mol_type = other RNA
tcaccctggggaactgttaa

SEQ ID NO: 21382 - RNA, 20 nt, synthetic construct
  misc_feature 1..20: note = C9Orf72 CTCN PAM targeting sequence
  source 1..20: mol_type = other RNA
cccattctcttcaccctggg

SEQ ID NO: 21383 - RNA, 20 nt, synthetic construct
  misc_feature 1..20: note = C9Orf72 CTCN PAM targeting sequence
  source 1..20: mol_type = other RNA
gatccatttcagatgatgaa

SEQ ID NO: 21384 - RNA, 20 nt, synthetic construct
  misc_feature 1..20: note = C9Orf72 CTCN PAM targeting sequence
  source 1..20: mol_type = other RNA
acacaaaaagattagtttct

SEQ ID NO: 21385 - RNA, 20 nt, synthetic construct
  misc_feature 1..20: note = C9Orf72 CTCN PAM targeting sequence
  source 1..20: mol_type = other RNA
tcagatcttttgatcatttt

SEQ ID NO: 21386 - RNA, 20 nt, synthetic construct
  misc_feature 1..20: note = C9Orf72 CTCN PAM targeting sequence
  source 1..20: mol_type = other RNA
ggaatgtgtaataaaaagtg

SEQ ID NO: 21387 - RNA, 20 nt, synthetic construct
  misc_feature 1..20: note = C9Orf72 CTCN PAM targeting sequence
  source 1..20: mol_type = other RNA
agcaaatcactttttattac

SEQ ID NO: 21388 - RNA, 20 nt, synthetic construct
  misc_feature 1..20: note = C9Orf72 CTCN PAM targeting sequence
  source 1..20: mol_type = other RNA
tttttcactacaagtaaata

SEQ ID NO: 21389 - RNA, 20 nt, synthetic construct
  misc_feature 1..20: note = C9Orf72 CTCN PAM targeting sequence
  source 1..20: mol_type = other RNA
tgcagcctctctttttcttt

SEQ ID NO: 21390 - RNA, 20 nt, synthetic construct
  misc_feature 1..20: note = C9Orf72 CTCN PAM targeting sequence
  source 1..20: mol_type = other RNA
ctttttctttttcccacatc

SEQ ID NO: 21391 - RNA, 20 nt, synthetic construct
  misc_feature 1..20: note = C9Orf72 CTCN PAM targeting sequence
  source 1..20: mol_type = other RNA
ttttctttttcccacatctc

SEQ ID NO: 21392 - RNA, 20 nt, synthetic construct
  misc_feature 1..20: note = C9Orf72 CTCN PAM targeting sequence
  source 1..20: mol_type = other RNA
ttcatcctattcaacgattt

SEQ ID NO: 21393 - RNA, 20 nt, synthetic construct
  misc_feature 1..20: note = C9Orf72 CTCN PAM targeting sequence
  source 1..20: mol_type = other RNA
ctcctctaactttcctcttc

SEQ ID NO: 21394 - RNA, 20 nt, synthetic construct
  misc_feature 1..20: note = C9Orf72 CTCN PAM targeting sequence
  source 1..20: mol_type = other RNA
cctctaactttcctcttctt

SEQ ID NO: 21395 - RNA, 20 nt, synthetic construct
  misc_feature 1..20: note = C9Orf72 CTCN PAM targeting sequence
  source 1..20: mol_type = other RNA
tctaactttcctcttctttg

SEQ ID NO: 21396 - RNA, 20 nt, synthetic construct
  misc_feature 1..20: note = C9Orf72 CTCN PAM targeting sequence
  source 1..20: mol_type = other RNA
aactttcctcttctttggag

SEQ ID NO: 21397 - RNA, 20 nt, synthetic construct
  misc_feature 1..20: note = C9Orf72 CTCN PAM targeting sequence
  source 1..20: mol_type = other RNA
tttatgaggcaaaagcgact

SEQ ID NO: 21398 - RNA, 20 nt, synthetic construct
  misc_feature 1..20: note = C9Orf72 CTCN PAM targeting sequence
  source 1..20: mol_type = other RNA
taaaagagtctgaggtttag

SEQ ID NO: 21399 - RNA, 20 nt, synthetic construct
  misc_feature 1..20: note = C9Orf72 CTCN PAM targeting sequence
  source 1..20: mol_type = other RNA
gatccttaacttccatcaca

SEQ ID NO: 21400 - RNA, 20 nt, synthetic construct
  misc_feature 1..20: note = C9Orf72 CTCN PAM targeting sequence
  source 1..20: mol_type = other RNA
ggaactatgaattggaacat

SEQ ID NO: 21401 - RNA, 20 nt, synthetic construct
  misc_feature 1..20: note = C9Orf72 CTCN PAM targeting sequence
  source 1..20: mol_type = other RNA
tcatgttccaattcatagtt

SEQ ID NO: 21402 - RNA, 20 nt, synthetic construct
  misc_feature 1..20: note = C9Orf72 CTCN PAM targeting sequence
  source 1..20: mol_type = other RNA
tgggaaactatacttattat

SEQ ID NO: 21403 - RNA, 20 nt, synthetic construct
  misc_feature 1..20: note = C9Orf72 CTCN PAM targeting sequence
  source 1..20: mol_type = other RNA
gataacatgaatgcaataga

SEQ ID NO: 21404 - RNA, 20 nt, synthetic construct
  misc_feature 1..20: note = C9Orf72 CTCN PAM targeting sequence
  source 1..20: mol_type = other RNA
cagataacatgaatgcaata

SEQ ID NO: 21405 - RNA, 20 nt, synthetic construct
  misc_feature 1..20: note = C9Orf72 CTCN PAM targeting sequence
  source 1..20: mol_type = other RNA
tacctaagtgcctctgtcac

SEQ ID NO: 21406 - RNA, 20 nt, synthetic construct
  misc_feature 1..20: note = C9Orf72 CTCN PAM targeting sequence
  source 1..20: mol_type = other RNA
gtcactcaaacactccccac

SEQ ID NO: 21407 - RNA, 20 nt, synthetic construct
  misc_feature 1..20: note = C9Orf72 CTCN PAM targeting sequence
  source 1..20: mol_type = other RNA
aacactccccaccatctaag

SEQ ID NO: 21408 - RNA, 20 nt, synthetic construct
  misc_feature 1..20: note = C9Orf72 CTCN PAM targeting sequence
  source 1..20: mol_type = other RNA
ccaccatctaaggcagtgcc

SEQ ID NO: 21409 - RNA, 20 nt, synthetic construct
  misc_feature 1..20: note = C9Orf72 CTCN PAM targeting sequence
  source 1..20: mol_type = other RNA
gcactggcaccacttgaccc

SEQ ID NO: 21410 - RNA, 20 nt, synthetic construct
  misc_feature 1..20: note = C9Orf72 CTCN PAM targeting sequence
  source 1..20: mol_type = other RNA
gtttttttgggatgcagtac

SEQ ID NO: 21411 - RNA, 20 nt, synthetic construct
  misc_feature 1..20: note = C9Orf72 CTCN PAM targeting sequence
  source 1..20: mol_type = other RNA
gaagaaaacaaacattcttt

SEQ ID NO: 21412 - RNA, 20 nt, synthetic construct
  misc_feature 1..20: note = C9Orf72 CTCN PAM targeting sequence
  source 1..20: mol_type = other RNA
actctgaagaaaacaaacat

SEQ ID NO: 21413 - RNA, 20 nt, synthetic construct
  misc_feature 1..20: note = C9Orf72 CTCN PAM targeting sequence
  source 1..20: mol_type = other RNA
aaactcttatgattaaactt

SEQ ID NO: 21414 - RNA, 20 nt, synthetic construct
  misc_feature 1..20: note = C9Orf72 CTCN PAM targeting sequence
  source 1..20: mol_type = other RNA
tatgattaaactttctcccc

SEQ ID NO: 21415 - RNA, 20 nt, synthetic construct
  misc_feature 1..20: note = C9Orf72 CTCN PAM targeting sequence
  source 1..20: mol_type = other RNA
cctcccaccccggcctttca

SEQ ID NO: 21416 - RNA, 20 nt, synthetic construct
  misc_feature 1..20: note = C9Orf72 CTCN PAM targeting sequence
  source 1..20: mol_type = other RNA
caccccggcctttcataatt

SEQ ID NO: 21417 - RNA, 20 nt, synthetic construct
  misc_feature 1..20: note = C9Orf72 CTCN PAM targeting sequence
  source 1..20: mol_type = other RNA
actcaatgaaaatcagtgca

SEQ ID NO: 21418 - RNA, 20 nt, synthetic construct
  misc_feature 1..20: note = C9Orf72 CTCN PAM targeting sequence
  source 1..20: mol_type = other RNA
tgcttctcaactcaatgaaa

SEQ ID NO: 21419 - RNA, 20 nt, synthetic construct
  misc_feature 1..20: note = C9Orf72 CTCN PAM targeting sequence
  source 1..20: mol_type = other RNA
cctgcttctcaactcaatga

SEQ ID NO: 21420 - RNA, 20 nt, synthetic construct
  misc_feature 1..20: note = C9Orf72 CTCN PAM targeting sequence
  source 1..20: mol_type = other RNA
agaagatcctcaagatctaa

SEQ ID NO: 21421 - RNA, 20 nt, synthetic construct
  misc_feature 1..20: note = C9Orf72 CTCN PAM targeting sequence
  source 1..20: mol_type = other RNA
agatctaagttttcatcata

SEQ ID NO: 21422 - RNA, 20 nt, synthetic construct
  misc_feature 1..20: note = C9Orf72 CTCN PAM targeting sequence
  source 1..20: mol_type = other RNA
aagtacagagagcacgttaa

SEQ ID NO: 21423 - RNA, 20 nt, synthetic construct
  misc_feature 1..20: note = C9Orf72 CTCN PAM targeting sequence
  source 1..20: mol_type = other RNA
gtactttgaggagcagggct

SEQ ID NO: 21424 - RNA, 20 nt, synthetic construct
  misc_feature 1..20: note = C9Orf72 CTCN PAM targeting sequence
  source 1..20: mol_type = other RNA
ctgtactttgaggagcaggg

SEQ ID NO: 21425 - RNA, 20 nt, synthetic construct
  misc_feature 1..20: note = C9Orf72 CTCN PAM targeting sequence
  source 1..20: mol_type = other RNA
ttataaagtcatactttatc

SEQ ID NO: 21426 - RNA, 20 nt, synthetic construct
  misc_feature 1..20: note = C9Orf72 CTCN PAM targeting sequence
  source 1..20: mol_type = other RNA
tattttatatgtataatgtc

SEQ ID NO: 21427 - RNA, 20 nt, synthetic construct
  misc_feature 1..20: note = C9Orf72 CTCN PAM targeting sequence
  source 1..20: mol_type = other RNA
tggtgccacctgtctctaaa

SEQ ID NO: 21428 - RNA, 20 nt, synthetic construct
  misc_feature 1..20: note = C9Orf72 CTCN PAM targeting sequence
  source 1..20: mol_type = other RNA
aaatctgcacactctggcca

SEQ ID NO: 21429 - RNA, 20 nt, synthetic construct
  misc_feature 1..20: note = C9Orf72 CTCN PAM targeting sequence
  source 1..20: mol_type = other RNA
agacattaaccaatgtcccc

SEQ ID NO: 21430 - RNA, 20 nt, synthetic construct
  misc_feature 1..20: note = C9Orf72 CTCN PAM targeting sequence
  source 1..20: mol_type = other RNA
caaccaaaattgtctccaga

SEQ ID NO: 21431 - RNA, 20 nt, synthetic construct
  misc_feature 1..20: note = C9Orf72 CTCN PAM targeting sequence
  source 1..20: mol_type = other RNA
cagttctcacaaccaaaatt

SEQ ID NO: 21432 - RNA, 20 nt, synthetic construct
  misc_feature 1..20: note = C9Orf72 CTCN PAM targeting sequence
  source 1..20: mol_type = other RNA
taaactaatgctattgagat

SEQ ID NO: 21433 - RNA, 20 nt, synthetic construct
  misc_feature 1..20: note = C9Orf72 CTCN PAM targeting sequence
  source 1..20: mol_type = other RNA
atagcattagtttaggagta

SEQ ID NO: 21434 - RNA, 20 nt, synthetic construct
  misc_feature 1..20: note = C9Orf72 CTCN PAM targeting sequence
  source 1..20: mol_type = other RNA
aaaaggctgactgtcttctt

SEQ ID NO: 21435 - RNA, 20 nt, synthetic construct
  misc_feature 1..20: note = C9Orf72 CTCN PAM targeting sequence
  source 1..20: mol_type = other RNA
tatttataaataaagccact

SEQ ID NO: 21436 - RNA, 20 nt, synthetic construct
  misc_feature 1..20: note = C9Orf72 CTCN PAM targeting sequence
  source 1..20: mol_type = other RNA
tttataaatttcctgctact

SEQ ID NO: 21437 - RNA, 20 nt, synthetic construct
  misc_feature 1..20: note = C9Orf72 CTCN PAM targeting sequence
  source 1..20: mol_type = other RNA
agcatgccattgccccagga

SEQ ID NO: 21438 - RNA, 20 nt, synthetic construct
  misc_feature 1..20: note = C9Orf72 CTCN PAM targeting sequence
  source 1..20: mol_type = other RNA
tggggcaatggcatgcttga

SEQ ID NO: 21439 - RNA, 20 nt, synthetic construct
  misc_feature 1..20: note = C9Orf72 CTCN PAM targeting sequence
  source 1..20: mol_type = other RNA
aagaaggtctcctggggcaa

SEQ ID NO: 21440 - RNA, 20 nt, synthetic construct
  misc_feature 1..20: note = C9Orf72 CTCN PAM targeting sequence
  source 1..20: mol_type = other RNA
ttgcagggttagagatagat

SEQ ID NO: 21441 - RNA, 20 nt, synthetic construct
  misc_feature 1..20: note = C9Orf72 CTCN PAM targeting sequence
  source 1..20: mol_type = other RNA
aaccctgcaaggagctgcta

SEQ ID NO: 21442 - RNA, 20 nt, synthetic construct
  misc_feature 1..20: note = C9Orf72 CTCN PAM targeting sequence
  source 1..20: mol_type = other RNA
acatcaaggactaaaaacta

SEQ ID NO: 21443 - RNA, 20 nt, synthetic construct
  misc_feature 1..20: note = C9Orf72 CTCN PAM targeting sequence
  source 1..20: mol_type = other RNA
aattttatggggcatcttat

SEQ ID NO: 21444 - RNA, 20 nt, synthetic construct
  misc_feature 1..20: note = C9Orf72 CTCN PAM targeting sequence
  source 1..20: mol_type = other RNA
tttctgcctggaaggaaatc

SEQ ID NO: 21445 - RNA, 20 nt, synthetic construct
  misc_feature 1..20: note = C9Orf72 CTCN PAM targeting sequence
  source 1..20: mol_type = other RNA
tcatttctgcctggaaggaa

SEQ ID NO: 21446 - RNA, 20 nt, synthetic construct
  misc_feature 1..20: note = C9Orf72 CTCN PAM targeting sequence
  source 1..20: mol_type = other RNA
atttactctatttgcatgag

SEQ ID NO: 21447 - RNA, 20 nt, synthetic construct
  misc_feature 1..20: note = C9Orf72 CTCN PAM targeting sequence
  source 1..20: mol_type = other RNA
atttgcatgagttttttctc

SEQ ID NO: 21448 - RNA, 20 nt, synthetic construct
  misc_feature 1..20: note = C9Orf72 CTCN PAM targeting sequence
  source 1..20: mol_type = other RNA
tgcaaatagagtaaatagag

SEQ ID NO: 21449 - RNA, 20 nt, synthetic construct
  misc_feature 1..20: note = C9Orf72 CTCN PAM targeting sequence
  source 1..20: mol_type = other RNA
ttcatcgcaatgccatttcc

SEQ ID NO: 21450 - RNA, 20 nt, synthetic construct
  misc_feature 1..20: note = C9Orf72 CTCN PAM targeting sequence
  source 1..20: mol_type = other RNA
tctttacgtatccattcctg

SEQ ID NO: 21451 - RNA, 20 nt, synthetic construct
  misc_feature 1..20: note = C9Orf72 CTCN PAM targeting sequence
  source 1..20: mol_type = other RNA
gtcaaacctcttctttacgt

SEQ ID NO: 21452 - RNA, 20 nt, synthetic construct
  misc_feature 1..20: note = C9Orf72 CTCN PAM targeting sequence
  source 1..20: mol_type = other RNA
tgtgttcttggcccttctta

SEQ ID NO: 21453 - RNA, 20 nt, synthetic construct
  misc_feature 1..20: note = C9Orf72 CTCN PAM targeting sequence
  source 1..20: mol_type = other RNA
agtagtcaaaagaatgtaaa

SEQ ID NO: 21454 - RNA, 20 nt, synthetic construct
  misc_feature 1..20: note = C9Orf72 CTCN PAM targeting sequence
  source 1..20: mol_type = other RNA
agtcctatttcctttccttg

SEQ ID NO: 21455 - RNA, 20 nt, synthetic construct
  misc_feature 1..20: note = C9Orf72 CTCN PAM targeting sequence
  source 1..20: mol_type = other RNA
tcataatatacatgtatccc

SEQ ID NO: 21456 - RNA, 20 nt, synthetic construct
  misc_feature 1..20: note = C9Orf72 CTCN PAM targeting sequence
  source 1..20: mol_type = other RNA
catcataatatacatgtatc

SEQ ID NO: 21457 - RNA, 20 nt, synthetic construct
  misc_feature 1..20: note = C9Orf72 CTCN PAM targeting sequence
  source 1..20: mol_type = other RNA
ctctcatcataatatacatg

SEQ ID NO: 21458 - RNA, 20 nt, synthetic construct
  misc_feature 1..20: note = C9Orf72 CTCN PAM targeting sequence
  source 1..20: mol_type = other RNA
tttttaaccaatatttttaa

SEQ ID NO: 21459 - RNA, 20 nt, synthetic construct
  misc_feature 1..20: note = C9Orf72 CTCN PAM targeting sequence
  source 1..20: mol_type = other RNA
ttagaaaactcttttttaac

SEQ ID NO: 21460 - RNA, 20 nt, synthetic construct
  misc_feature 1..20: note = C9Orf72 CTCN PAM targeting sequence
  source 1..20: mol_type = other RNA
gtcaagtgcaacctccttag

SEQ ID NO: 21461 - RNA, 20 nt, synthetic construct
  misc_feature 1..20: note = C9Orf72 CTCN PAM targeting sequence
  source 1..20: mol_type = other RNA
tcagtgcagtctctgtcaag

SEQ ID NO: 21462 - RNA, 20 nt, synthetic construct
  misc_feature 1..20: note = C9Orf72 CTCN PAM targeting sequence
  source 1..20: mol_type = other RNA
ttctcttcagtgcagtctct

SEQ ID NO: 21463 - RNA, 20 nt, synthetic construct
  misc_feature 1..20: note = C9Orf72 CTCN PAM targeting sequence
  source 1..20: mol_type = other RNA
agcatttgcattttgtgttc

SEQ ID NO: 21464 - RNA, 20 nt, synthetic construct
  misc_feature 1..20: note = C9Orf72 CTCN PAM targeting sequence
  source 1..20: mol_type = other RNA
agaaacagcaagaaggctgt

SEQ ID NO: 21465 - RNA, 20 nt, synthetic construct
  misc_feature 1..20: note = C9Orf72 CTCN PAM targeting sequence
  source 1..20: mol_type = other RNA
caaatttacaaaataattgt

SEQ ID NO: 21466 - RNA, 20 nt, synthetic construct
  misc_feature 1..20: note = C9Orf72 CTCN PAM targeting sequence
  source 1..20: mol_type = other RNA
aatttacaaaataattgtga

SEQ ID NO: 21467 - RNA, 20 nt, synthetic construct
  misc_feature 1..20: note = C9Orf72 CTCN PAM targeting sequence
  source 1..20: mol_type = other RNA
caattattttgtaaatttga

SEQ ID NO: 21468 - RNA, 20 nt, synthetic construct
  misc_feature 1..20: note = C9Orf72 CTCN PAM targeting sequence
  source 1..20: mol_type = other RNA
tctgtactaaaaaaaagtac

SEQ ID NO: 21469 - RNA, 20 nt, synthetic construct
  misc_feature 1..20: note = C9Orf72 CTCN PAM targeting sequence
  source 1..20: mol_type = other RNA
acagtagaggaggccaaaga

SEQ ID NO: 21470 - RNA, 20 nt, synthetic construct
  misc_feature 1..20: note = C9Orf72 CTCN PAM targeting sequence
  source 1..20: mol_type = other RNA
acctttcatggactttcatg

SEQ ID NO: 21471 - RNA, 20 nt, synthetic construct
  misc_feature 1..20: note = C9Orf72 CTCN PAM targeting sequence
  source 1..20: mol_type = other RNA
ggtgaaaccgcagcactggc

SEQ ID NO: 21472 - RNA, 20 nt, synthetic construct
  misc_feature 1..20: note = C9Orf72 CTCN PAM targeting sequence
  source 1..20: mol_type = other RNA
cttaggttgttggcaaaatg

SEQ ID NO: 21473 - RNA, 20 nt, synthetic construct
  misc_feature 1..20: note = C9Orf72 CTCN PAM targeting sequence
  source 1..20: mol_type = other RNA
tggtttctttttaaattcaa

SEQ ID NO: 21474 - RNA, 20 nt, synthetic construct
  misc_feature 1..20: note = C9Orf72 CTCN PAM targeting sequence
  source 1..20: mol_type = other RNA
aagaattatagaactgtgtc

SEQ ID NO: 21475 - RNA, 20 nt, synthetic construct
  misc_feature 1..20: note = C9Orf72 CTCN PAM targeting sequence
  source 1..20: mol_type = other RNA
aggaagtaaggaagtgctca

SEQ ID NO: 21476 - RNA, 20 nt, synthetic construct
  misc_feature 1..20: note = C9Orf72 CTCN PAM targeting sequence
  source 1..20: mol_type = other RNA
cgtactttctccttgcccaa

SEQ ID NO: 21477 - RNA, 20 nt, synthetic construct
  misc_feature 1..20: note = C9Orf72 CTCN PAM targeting sequence
  source 1..20: mol_type = other RNA
ttgcccaatcctgaaatcac

SEQ ID NO: 21478 - RNA, 20 nt, synthetic construct
  misc_feature 1..20: note = C9Orf72 CTCN PAM targeting sequence
  source 1..20: mol_type = other RNA
caaaacgtggcacagcattt

SEQ ID NO: 21479 - RNA, 20 nt, synthetic construct
  misc_feature 1..20: note = C9Orf72 CTCN PAM targeting sequence
  source 1..20: mol_type = other RNA
aaacgtggcacagcattttt

SEQ ID NO: 21480 - RNA, 20 nt, synthetic construct
  misc_feature 1..20: note = C9Orf72 CTCN PAM targeting sequence
  source 1..20: mol_type = other RNA
gagtattaagatctgctata

SEQ ID NO: 21481 - RNA, 20 nt, synthetic construct
  misc_feature 1..20: note = C9Orf72 CTCN PAM targeting sequence
  source 1..20: mol_type = other RNA
gaggatgttataagaaaacg

SEQ ID NO: 21482 - RNA, 20 nt, synthetic construct
  misc_feature 1..20: note = C9Orf72 CTCN PAM targeting sequence
  source 1..20: mol_type = other RNA
tatggccttgattttattta

SEQ ID NO: 21483 - RNA, 20 nt, synthetic construct
  misc_feature 1..20: note = C9Orf72 CTCN PAM targeting sequence
  source 1..20: mol_type = other RNA
tggtttctcttatggccttg

SEQ ID NO: 21484 - RNA, 20 nt, synthetic construct
  misc_feature 1..20: note = C9Orf72 CTCN PAM targeting sequence
  source 1..20: mol_type = other RNA
catggtttctcttatggcct

SEQ ID NO: 21485 - RNA, 20 nt, synthetic construct
  misc_feature 1..20: note = C9Orf72 CTCN PAM targeting sequence
  source 1..20: mol_type = other RNA
ctatattttcaagaatattt

SEQ ID NO: 21486 - RNA, 20 nt, synthetic construct
  misc_feature 1..20: note = C9Orf72 CTCN PAM targeting sequence
  source 1..20: mol_type = other RNA
tctccctatattttcaagaa

SEQ ID NO: 21487 - RNA, 20 nt, synthetic construct
  misc_feature 1..20: note = C9Orf72 CTCN PAM targeting sequence
  source 1..20: mol_type = other RNA
gcgtattccttgcatctttt

SEQ ID NO: 21488 - RNA, 20 nt, synthetic construct
  misc_feature 1..20: note = C9Orf72 CTCN PAM targeting sequence
  source 1..20: mol_type = other RNA
ttaagaaaattagtaattgg

SEQ ID NO: 21489 - RNA, 20 nt, synthetic construct
  misc_feature 1..20: note = C9Orf72 CTCN PAM targeting sequence
  source 1..20: mol_type = other RNA
cacttctgaatacttaaaga

SEQ ID NO: 21490 - RNA, 20 nt, synthetic construct
  misc_feature 1..20: note = C9Orf72 CTCN PAM targeting sequence
  source 1..20: mol_type = other RNA
gtgggttataaagccaattt

SEQ ID NO: 21491 - RNA, 20 nt, synthetic construct
  misc_feature 1..20: note = C9Orf72 CTCN PAM targeting sequence
  source 1..20: mol_type = other RNA
tgaagaaattggctttataa

SEQ ID NO: 21492 - RNA, 20 nt, synthetic construct
  misc_feature 1..20: note = C9Orf72 CTCN PAM targeting sequence
  source 1..20: mol_type = other RNA
aatatatttttcccttggca

SEQ ID NO: 21493 - RNA, 20 nt, synthetic construct
  misc_feature 1..20: note = C9Orf72 CTCN PAM targeting sequence
  source 1..20: mol_type = other RNA
tgaaacttggctacagaaga

SEQ ID NO: 21494 - RNA, 20 nt, synthetic construct
  misc_feature 1..20: note = C9Orf72 CTCN PAM targeting sequence
  source 1..20: mol_type = other RNA
tcttgaaacttggctacaga

SEQ ID NO: 21495 - RNA, 20 nt, synthetic construct
  misc_feature 1..20: note = C9Orf72 CTCN PAM targeting sequence
  source 1..20: mol_type = other RNA
aaattttctaacttgaccaa

SEQ ID NO: 21496 - RNA, 20 nt, synthetic construct
  misc_feature 1..20: note = C9Orf72 CTCN PAM targeting sequence
  source 1..20: mol_type = other RNA
ttatcaaaaacaattgcaga

SEQ ID NO: 21497 - RNA, 20 nt, synthetic construct
  misc_feature 1..20: note = C9Orf72 CTCN PAM targeting sequence
  source 1..20: mol_type = other RNA
atgttgcaagaggtatacat

SEQ ID NO: 21498 - RNA, 20 nt, synthetic construct
  misc_feature 1..20: note = C9Orf72 CTCN PAM targeting sequence
  source 1..20: mol_type = other RNA
gttgtggctgatcctgtagc

SEQ ID NO: 21499 - RNA, 20 nt, synthetic construct
  misc_feature 1..20: note = C9Orf72 CTCN PAM targeting sequence
  source 1..20: mol_type = other RNA
gtcaacctaaatggcaaaca

SEQ ID NO: 21500 - RNA, 20 nt, synthetic construct
  misc_feature 1..20: note = C9Orf72 CTCN PAM targeting sequence
  source 1..20: mol_type = other RNA
gacaacctgcacaaaatact

SEQ ID NO: 21501 - RNA, 20 nt, synthetic construct
  misc_feature 1..20: note = C9Orf72 CTCN PAM targeting sequence
  source 1..20: mol_type = other RNA
gtgtgtgatctctgacaacc

SEQ ID NO: 21502 - RNA, 20 nt, synthetic construct
  misc_feature 1..20: note = C9Orf72 CTCN PAM targeting sequence
  source 1..20: mol_type = other RNA
cttgattctgtacccatttg

SEQ ID NO: 21503 - RNA, 20 nt, synthetic construct
  misc_feature 1..20: note = C9Orf72 CTCN PAM targeting sequence
  source 1..20: mol_type = other RNA
taagttcagtggacaaagtg

SEQ ID NO: 21504 - RNA, 20 nt, synthetic construct
  misc_feature 1..20: note = C9Orf72 CTCN PAM targeting sequence
  source 1..20: mol_type = other RNA
gggattctgtctcctggctt

SEQ ID NO: 21505 - RNA, 20 nt, synthetic construct
  misc_feature 1..20: note = C9Orf72 CTCN PAM targeting sequence
  source 1..20: mol_type = other RNA
tggcttcagaagcagatact

SEQ ID NO: 21506 - RNA, 20 nt, synthetic construct
  misc_feature 1..20: note = C9Orf72 CTCN PAM targeting sequence
  source 1..20: mol_type = other RNA
agatttcttttcacataaat

SEQ ID NO: 21507 - RNA, 20 nt, synthetic construct
  misc_feature 1..20: note = C9Orf72 CTCN PAM targeting sequence
  source 1..20: mol_type = other RNA
atgttccttccaccattatc

SEQ ID NO: 21508 - RNA, 20 nt, synthetic construct
  misc_feature 1..20: note = C9Orf72 CTCN PAM targeting sequence
  source 1..20: mol_type = other RNA
gagctgatcttgattccagg

SEQ ID NO: 21509 - RNA, 20 nt, synthetic construct
  misc_feature 1..20: note = C9Orf72 CTCN PAM targeting sequence
  source 1..20: mol_type = other RNA
gagccagtgtccagtagtcc

SEQ ID NO: 21510 - RNA, 20 nt, synthetic construct
  misc_feature 1..20: note = C9Orf72 CTCN PAM targeting sequence
  source 1..20: mol_type = other RNA
agtgccagcatgcataattg

SEQ ID NO: 21511 - RNA, 20 nt, synthetic construct
  misc_feature 1..20: note = C9Orf72 CTCN PAM targeting sequence
  source 1..20: mol_type = other RNA
cattggcttcctgactggta

SEQ ID NO: 21512 - RNA, 20 nt, synthetic construct
  misc_feature 1..20: note = C9Orf72 CTCN PAM targeting sequence
  source 1..20: mol_type = other RNA
cccatttggcctgtgcagaa

SEQ ID NO: 21513 - RNA, 20 nt, synthetic construct
  misc_feature 1..20: note = C9Orf72 CTCN PAM targeting sequence
  source 1..20: mol_type = other RNA
catttggcctgtgcagaaga

SEQ ID NO: 21514 - RNA, 20 nt, synthetic construct
  misc_feature 1..20: note = C9Orf72 CTCN PAM targeting sequence
  source 1..20: mol_type = other RNA
cagacccatctgtcttctgc

SEQ ID NO: 21515 - RNA, 20 nt, synthetic construct
  misc_feature 1..20: note = C9Orf72 CTCN PAM targeting sequence
  source 1..20: mol_type = other RNA
ttcatgtatagtgcacagcc

SEQ ID NO: 21516 - RNA, 20 nt, synthetic construct
  misc_feature 1..20: note = C9Orf72 CTCN PAM targeting sequence
  source 1..20: mol_type = other RNA
ggccatccagccaaaccatt

SEQ ID NO: 21517 - RNA, 20 nt, synthetic construct
  misc_feature 1..20: note = C9Orf72 CTCN PAM targeting sequence
  source 1..20: mol_type = other RNA
cattttcttgtcaccaattt

SEQ ID NO: 21518 - RNA, 20 nt, synthetic construct
  misc_feature 1..20: note = C9Orf72 CTCN PAM targeting sequence
  source 1..20: mol_type = other RNA
tcctcacattttcttgtcac

SEQ ID NO: 21519 - RNA, 20 nt, synthetic construct
  misc_feature 1..20: note = C9Orf72 CTCN PAM targeting sequence
  source 1..20: mol_type = other RNA
ctgagtggtcaaaaactgtg

SEQ ID NO: 21520 - RNA, 20 nt, synthetic construct
  misc_feature 1..20: note = C9Orf72 CTCN PAM targeting sequence
  source 1..20: mol_type = other RNA
gagtggtcaaaaactgtgaa

SEQ ID NO: 21521 - RNA, 20 nt, synthetic construct
  misc_feature 1..20: note = C9Orf72 CTCN PAM targeting sequence
  source 1..20: mol_type = other RNA
gagaggtccatccacatacc

SEQ ID NO: 21522 - RNA, 20 nt, synthetic construct
  misc_feature 1..20: note = C9Orf72 CTCN PAM targeting sequence
  source 1..20: mol_type = other RNA
tatgggatacaaatatcttc

SEQ ID NO: 21523 - RNA, 20 nt, synthetic construct
  misc_feature 1..20: note = C9Orf72 CTCN PAM targeting sequence
  source 1..20: mol_type = other RNA
ccaatgggtgacctcagcag

SEQ ID NO: 21524 - RNA, 20 nt, synthetic construct
  misc_feature 1..20: note = C9Orf72 CTCN PAM targeting sequence
  source 1..20: mol_type = other RNA
gactaagacactcacttaac

SEQ ID NO: 21525 - RNA, 20 nt, synthetic construct
  misc_feature 1..20: note = C9Orf72 CTCN PAM targeting sequence
  source 1..20: mol_type = other RNA
cttaacagctaaagaagtgt

SEQ ID NO: 21526 - RNA, 20 nt, synthetic construct
  misc_feature 1..20: note = C9Orf72 CTCN PAM targeting sequence
  source 1..20: mol_type = other RNA
tgctcatggagttcactggt

SEQ ID NO: 21527 - RNA, 20 nt, synthetic construct
  misc_feature 1..20: note = C9Orf72 CTCN PAM targeting sequence
  source 1..20: mol_type = other RNA
tggagttcactggtcttatc

SEQ ID NO: 21528 - RNA, 20 nt, synthetic construct
  misc_feature 1..20: note = C9Orf72 CTCN PAM targeting sequence
  source 1..20: mol_type = other RNA
atgagcatgagcccactgcc

SEQ ID NO: 21529 - RNA, 20 nt, synthetic construct
  misc_feature 1..20: note = C9Orf72 CTCN PAM targeting sequence
  source 1..20: mol_type = other RNA
tttctgcagctggtcatgtg

SEQ ID NO: 21530 - RNA, 20 nt, synthetic construct
  misc_feature 1..20: note = C9Orf72 CTCN PAM targeting sequence
  source 1..20: mol_type = other RNA
ttctgtaaaaacctgtttgt

SEQ ID NO: 21531 - RNA, 20 nt, synthetic construct
  misc_feature 1..20: note = C9Orf72 CTCN PAM targeting sequence
  source 1..20: mol_type = other RNA
tgtcacatgataaagtaaac

SEQ ID NO: 21532 - RNA, 20 nt, synthetic construct
  misc_feature 1..20: note = C9Orf72 CTCN PAM targeting sequence
  source 1..20: mol_type = other RNA
aatactattacataaagtta

SEQ ID NO: 21533 - RNA, 20 nt, synthetic construct
  misc_feature 1..20: note = C9Orf72 CTCN PAM targeting sequence
  source 1..20: mol_type = other RNA
aactcaaatactattacata

SEQ ID NO: 21534 - RNA, 20 nt, synthetic construct
  misc_feature 1..20: note = C9Orf72 CTCN PAM targeting sequence
  source 1..20: mol_type = other RNA
cgagatgtgtatgggttcaa

SEQ ID NO: 21535 - RNA, 20 nt, synthetic construct
  misc_feature 1..20: note = C9Orf72 CTCN PAM targeting sequence
  source 1..20: mol_type = other RNA
tgagatcataatcttcaaat

SEQ ID NO: 21536 - RNA, 20 nt, synthetic construct
  misc_feature 1..20: note = C9Orf72 CTCN PAM targeting sequence
  source 1..20: mol_type = other RNA
ccaacttgaacccatacaca

SEQ ID NO: 21537 - RNA, 20 nt, synthetic construct
  misc_feature 1..20: note = C9Orf72 CTCN PAM targeting sequence
  source 1..20: mol_type = other RNA
atattaaccatcagaagtcc

SEQ ID NO: 21538 - RNA, 20 nt, synthetic construct
  misc_feature 1..20: note = C9Orf72 CTCN PAM targeting sequence
  source 1..20: mol_type = other RNA
cagacacacatgggatcaaa

SEQ ID NO: 21539 - RNA, 20 nt, synthetic construct
  misc_feature 1..20: note = C9Orf72 CTCN PAM targeting sequence
  source 1..20: mol_type = other RNA
tttggcaacaccctcacaga

SEQ ID NO: 21540 - RNA, 20 nt, synthetic construct
  misc_feature 1..20: note = C9Orf72 CTCN PAM targeting sequence
  source 1..20: mol_type = other RNA
aatattaatctcctttggca

SEQ ID NO: 21541 - RNA, 20 nt, synthetic construct
  misc_feature 1..20: note = C9Orf72 CTCN PAM targeting sequence
  source 1..20: mol_type = other RNA
ttcctaccattcagacatca

SEQ ID NO: 21542 - RNA, 20 nt, synthetic construct
  misc_feature 1..20: note = C9Orf72 CTCN PAM targeting sequence
  source 1..20: mol_type = other RNA
ggtagcagttgggggaaagg

SEQ ID NO: 21543 - RNA, 20 nt, synthetic construct
  misc_feature 1..20: note = C9Orf72 CTCN PAM targeting sequence
  source 1..20: mol_type = other RNA
catatatgctatataaggaa

SEQ ID NO: 21544 - RNA, 20 nt, synthetic construct
  misc_feature 1..20: note = C9Orf72 CTCN PAM targeting sequence
  source 1..20: mol_type = other RNA
ttaatactttaataatggga

SEQ ID NO: 21545 - RNA, 20 nt, synthetic construct
  misc_feature 1..20: note = C9Orf72 CTCN PAM targeting sequence
  source 1..20: mol_type = other RNA
agctgtcccattattaaagt

SEQ ID NO: 21546 - RNA, 20 nt, synthetic construct
  misc_feature 1..20: note = C9Orf72 CTCN PAM targeting sequence
  source 1..20: mol_type = other RNA
cagtttttacctgtcctaag

SEQ ID NO: 21547 - RNA, 20 nt, synthetic construct
  misc_feature 1..20: note = C9Orf72 CTCN PAM targeting sequence
  source 1..20: mol_type = other RNA
tgcagtgaaataatgttgcc

SEQ ID NO: 21548 - RNA, 20 nt, synthetic construct
  misc_feature 1..20: note = C9Orf72 CTCN PAM targeting sequence
  source 1..20: mol_type = other RNA
tgtggatgtacatcaatgac

SEQ ID NO: 21549 - RNA, 20 nt, synthetic construct
  misc_feature 1..20: note = C9Orf72 CTCN PAM targeting sequence
  source 1..20: mol_type = other RNA
tgaagcattttataaagatc

SEQ ID NO: 21550 - RNA, 20 nt, synthetic construct
  misc_feature 1..20: note = C9Orf72 CTCN PAM targeting sequence
  source 1..20: mol_type = other RNA
cttgatctatgatctttata

SEQ ID NO: 21551 - RNA, 20 nt, synthetic construct
  misc_feature 1..20: note = C9Orf72 CTCN PAM targeting sequence
  source 1..20: mol_type = other RNA
gtggatcagcagacttagcc

SEQ ID NO: 21552 - RNA, 20 nt, synthetic construct
  misc_feature 1..20: note = C9Orf72 CTCN PAM targeting sequence
  source 1..20: mol_type = other RNA
tggtggttctgaggaatctg

SEQ ID NO: 21553 - RNA, 20 nt, synthetic construct
  misc_feature 1..20: note = C9Orf72 CTCN PAM targeting sequence
  source 1..20: mol_type = other RNA
gaaccaccaggaggaaaggc

SEQ ID NO: 21554 - RNA, 20 nt, synthetic construct
  misc_feature 1..20: note = C9Orf72 CTCN PAM targeting sequence
  source 1..20: mol_type = other RNA
gggaagcacactccctctac

SEQ ID NO: 21555 - RNA, 20 nt, synthetic construct
  misc_feature 1..20: note = C9Orf72 CTCN PAM targeting sequence
  source 1..20: mol_type = other RNA
ctctaccaagggacagtcaa

SEQ ID NO: 21556 - RNA, 20 nt, synthetic construct
  misc_feature 1..20: note = C9Orf72 CTCN PAM targeting sequence
  source 1..20: mol_type = other RNA
accaagggacagtcaaagtg

SEQ ID NO: 21557 - RNA, 20 nt, synthetic construct
  misc_feature 1..20: note = C9Orf72 CTCN PAM targeting sequence
  source 1..20: mol_type = other RNA
cccagttgggtggcgtgggg

SEQ ID NO: 21558 - RNA, 20 nt, synthetic construct
  misc_feature 1..20: note = C9Orf72 CTCN PAM targeting sequence
  source 1..20: mol_type = other RNA
aacagaggttggcagacacc

SEQ ID NO: 21559 - RNA, 20 nt, synthetic construct
  misc_feature 1..20: note = C9Orf72 CTCN PAM targeting sequence
  source 1..20: mol_type = other RNA
gttggagggtctcacccagt

SEQ ID NO: 21560 - RNA, 20 nt, synthetic construct
  misc_feature 1..20: note = C9Orf72 CTCN PAM targeting sequence
  source 1..20: mol_type = other RNA
tatacagggtgtctgccaac

SEQ ID NO: 21561 - RNA, 20 nt, synthetic construct
  misc_feature 1..20: note = C9Orf72 CTCN PAM targeting sequence
  source 1..20: mol_type = other RNA
ccagcaagagtgcagaactg

SEQ ID NO: 21562 - RNA, 20 nt, synthetic construct
  misc_feature 1..20: note = C9Orf72 CTCN PAM targeting sequence
  source 1..20: mol_type = other RNA
agcaagagtgcagaactgga

SEQ ID NO: 21563 - RNA, 20 nt, synthetic construct
  misc_feature 1..20: note = C9Orf72 CTCN PAM targeting sequence
  source 1..20: mol_type = other RNA
tgctggagaggtgttgcaat

SEQ ID NO: 21564 - RNA, 20 nt, synthetic construct
  misc_feature 1..20: note = C9Orf72 CTCN PAM targeting sequence
  source 1..20: mol_type = other RNA
gtccagttctgcactcttgc

SEQ ID NO: 21565 - RNA, 20 nt, synthetic construct
  misc_feature 1..20: note = C9Orf72 CTCN PAM targeting sequence
  source 1..20: mol_type = other RNA
tcctctgtccagttctgcac

SEQ ID NO: 21566 - RNA, 20 nt, synthetic construct
  misc_feature 1..20: note = C9Orf72 CTCN PAM targeting sequence
  source 1..20: mol_type = other RNA
gttgagctaaaggagcatgt

SEQ ID NO: 21567 - RNA, 20 nt, synthetic construct
  misc_feature 1..20: note = C9Orf72 CTCN PAM targeting sequence
  source 1..20: mol_type = other RNA
acagagttttttattaccca

SEQ ID NO: 21568 - RNA, 20 nt, synthetic construct
  misc_feature 1..20: note = C9Orf72 CTCN PAM targeting sequence
  source 1..20: mol_type = other RNA
gatatcctttattttgcttg

SEQ ID NO: 21569 - RNA, 20 nt, synthetic construct
  misc_feature 1..20: note = C9Orf72 CTCN PAM targeting sequence
  source 1..20: mol_type = other RNA
aatcttgtctgcatgcctta

SEQ ID NO: 21570 - RNA, 20 nt, synthetic construct
  misc_feature 1..20: note = C9Orf72 CTCN PAM targeting sequence
  source 1..20: mol_type = other RNA
gttcattccttttcattctt

SEQ ID NO: 21571 - RNA, 20 nt, synthetic construct
  misc_feature 1..20: note = C9Orf72 CTCN PAM targeting sequence
  source 1..20: mol_type = other RNA
aagaaatatgggactatgta

SEQ ID NO: 21572 - RNA, 20 nt, synthetic construct
  misc_feature 1..20: note = C9Orf72 CTCN PAM targeting sequence
  source 1..20: mol_type = other RNA
gttctggatcaagtggacct

SEQ ID NO: 21573 - RNA, 20 nt, synthetic construct
  misc_feature 1..20: note = C9Orf72 CTCN PAM targeting sequence
  source 1..20: mol_type = other RNA
ccaccccaaatcaacagaat

SEQ ID NO: 21574 - RNA, 20 nt, synthetic construct
  misc_feature 1..20: note = C9Orf72 CTCN PAM targeting sequence
  source 1..20: mol_type = other RNA
accccaaatcaacagaatat

SEQ ID NO: 21575 - RNA, 20 nt, synthetic construct
  misc_feature 1..20: note = C9Orf72 CTCN PAM targeting sequence
  source 1..20: mol_type = other RNA
gatggtagtttatatttctt

SEQ ID NO: 21576 - RNA, 20 nt, synthetic construct
  misc_feature 1..20: note = C9Orf72 CTCN PAM targeting sequence
  source 1..20: mol_type = other RNA
taaggctaaaccaggaagaa

SEQ ID NO: 21577 - RNA, 20 nt, synthetic construct
  misc_feature 1..20: note = C9Orf72 CTCN PAM targeting sequence
  source 1..20: mol_type = other RNA
gggatgcaagcctggttcaa

SEQ ID NO: 21578 - RNA, 20 nt, synthetic construct
  misc_feature 1..20: note = C9Orf72 CTCN PAM targeting sequence
  source 1..20: mol_type = other RNA
gcccaaaaactccttaagct

SEQ ID NO: 21579 - RNA, 20 nt, synthetic construct
  misc_feature 1..20: note = C9Orf72 CTCN PAM targeting sequence
  source 1..20: mol_type = other RNA
ttaagctgataaacaacttc

SEQ ID NO: 21580 - RNA, 20 nt, synthetic construct
  misc_feature 1..20: note = C9Orf72 CTCN PAM targeting sequence
  source 1..20: mol_type = other RNA
ggatacaaaatcaatgtgca

SEQ ID NO: 21581 - RNA, 20 nt, synthetic construct
  misc_feature 1..20: note = C9Orf72 CTCN PAM targeting sequence
  source 1..20: mol_type = other RNA
gcttgtttattgtgggtgta

SEQ ID NO: 21582 - RNA, 20 nt, synthetic construct
  misc_feature 1..20: note = C9Orf72 CTCN PAM targeting sequence
  source 1..20: mol_type = other RNA
ctgcttgtttattgtgggtg

SEQ ID NO: 21583 - RNA, 20 nt, synthetic construct
  misc_feature 1..20: note = C9Orf72 CTCN PAM targeting sequence
  source 1..20: mol_type = other RNA
cattcacaattgctacaaag

SEQ ID NO: 21584 - RNA, 20 nt, synthetic construct
  misc_feature 1..20: note = C9Orf72 CTCN PAM targeting sequence
  source 1..20: mol_type = other RNA
ttgtagcaattgtgaatggg

SEQ ID NO: 21585 - RNA, 20 nt, synthetic construct
  misc_feature 1..20: note = C9Orf72 CTCN PAM targeting sequence
  source 1..20: mol_type = other RNA
tggataggaagaatcaatat

SEQ ID NO: 21586 - RNA, 20 nt, synthetic construct
  misc_feature 1..20: note = C9Orf72 CTCN PAM targeting sequence
  source 1..20: mol_type = other RNA
acagggtcttctttgattcc

SEQ ID NO: 21587 - RNA, 20 nt, synthetic construct
  misc_feature 1..20: note = C9Orf72 CTCN PAM targeting sequence
  source 1..20: mol_type = other RNA
agctttgttctttttgctta

SEQ ID NO: 21588 - RNA, 20 nt, synthetic construct
  misc_feature 1..20: note = C9Orf72 CTCN PAM targeting sequence
  source 1..20: mol_type = other RNA
gaagtcagttagcgtgatgt

SEQ ID NO: 21589 - RNA, 20 nt, synthetic construct
  misc_feature 1..20: note = C9Orf72 CTCN PAM targeting sequence
  source 1..20: mol_type = other RNA
attggtctatatatctgttt

SEQ ID NO: 21590 - RNA, 20 nt, synthetic construct
  misc_feature 1..20: note = C9Orf72 CTCN PAM targeting sequence
  source 1..20: mol_type = other RNA
gttctgctccattggtctat

SEQ ID NO: 21591 - RNA, 20 nt, synthetic construct
  misc_feature 1..20: note = C9Orf72 CTCN PAM targeting sequence
  source 1..20: mol_type = other RNA
gaaataacaccacacatcta

SEQ ID NO: 21592 - RNA, 20 nt, synthetic construct
  misc_feature 1..20: note = C9Orf72 CTCN PAM targeting sequence
  source 1..20: mol_type = other RNA
tatggcagaacattttttta

SEQ ID NO: 21593 - RNA, 20 nt, synthetic construct
  misc_feature 1..20: note = C9Orf72 CTCN PAM targeting sequence
  source 1..20: mol_type = other RNA
aggaacaacaacaaaaaaaa

SEQ ID NO: 21594 - RNA, 20 nt, synthetic construct
  misc_feature 1..20: note = C9Orf72 CTCN PAM targeting sequence
  source 1..20: mol_type = other RNA
agtgaaagaagctctaggaa

SEQ ID NO: 21595 - RNA, 20 nt, synthetic construct
  misc_feature 1..20: note = C9Orf72 CTCN PAM targeting sequence
  source 1..20: mol_type = other RNA
tgccacctagaacatcgatg

SEQ ID NO: 21596 - RNA, 20 nt, synthetic construct
  misc_feature 1..20: note = C9Orf72 CTCN PAM targeting sequence
  source 1..20: mol_type = other RNA
aagaaactgtcattgccctg

SEQ ID NO: 21597 - RNA, 20 nt, synthetic construct
  misc_feature 1..20: note = C9Orf72 CTCN PAM targeting sequence
  source 1..20: mol_type = other RNA
tgatggaagatggaattgct

SEQ ID NO: 21598 - RNA, 20 nt, synthetic construct
  misc_feature 1..20: note = C9Orf72 CTCN PAM targeting sequence
  source 1..20: mol_type = other RNA
acctgacaaaatcactgatg

SEQ ID NO: 21599 - RNA, 20 nt, synthetic construct
  misc_feature 1..20: note = C9Orf72 CTCN PAM targeting sequence
  source 1..20: mol_type = other RNA
ggcaagaaggataaaagttt

SEQ ID NO: 21600 - RNA, 20 nt, synthetic construct
  misc_feature 1..20: note = C9Orf72 CTCN PAM targeting sequence
  source 1..20: mol_type = other RNA
tctttatagaacaaaaagtc

SEQ ID NO: 21601 - RNA, 20 nt, synthetic construct
  misc_feature 1..20: note = C9Orf72 CTCN PAM targeting sequence
  source 1..20: mol_type = other RNA
tgcctttaatcccaatgctt

SEQ ID NO: 21602 - RNA, 20 nt, synthetic construct
  misc_feature 1..20: note = C9Orf72 CTCN PAM targeting sequence
  source 1..20: mol_type = other RNA
tagtgcaatacattacccat

SEQ ID NO: 21603 - RNA, 20 nt, synthetic construct
  misc_feature 1..20: note = C9Orf72 CTCN PAM targeting sequence
  source 1..20: mol_type = other RNA
aaggtgacaataaaaagtac

SEQ ID NO: 21604 - RNA, 20 nt, synthetic construct
  misc_feature 1..20: note = C9Orf72 CTCN PAM targeting sequence
  source 1..20: mol_type = other RNA
ttctacttataaaaataaag

SEQ ID NO: 21605 - RNA, 20 nt, synthetic construct
  misc_feature 1..20: note = C9Orf72 CTCN PAM targeting sequence
  source 1..20: mol_type = other RNA
gtcaactgctggtctgcttt

SEQ ID NO: 21606 - RNA, 20 nt, synthetic construct
  misc_feature 1..20: note = C9Orf72 CTCN PAM targeting sequence
  source 1..20: mol_type = other RNA
agaatttcatataaatggaa

SEQ ID NO: 21607 - RNA, 20 nt, synthetic construct
  misc_feature 1..20: note = C9Orf72 CTCN PAM targeting sequence
  source 1..20: mol_type = other RNA
tgactaaacaaaggtagaat

SEQ ID NO: 21608 - RNA, 20 nt, synthetic construct
  misc_feature 1..20: note = C9Orf72 CTCN PAM targeting sequence
  source 1..20: mol_type = other RNA
gcaattctacctttgtttag

SEQ ID NO: 21609 - RNA, 20 nt, synthetic construct
  misc_feature 1..20: note = C9Orf72 CTCN PAM targeting sequence
  source 1..20: mol_type = other RNA
tatgtttgctttattttatt

SEQ ID NO: 21610 - RNA, 20 nt, synthetic construct
  misc_feature 1..20: note = C9Orf72 CTCN PAM targeting sequence
  source 1..20: mol_type = other RNA
aataaatacctccttatttg

SEQ ID NO: 21611 - RNA, 20 nt, synthetic construct
  misc_feature 1..20: note = C9Orf72 CTCN PAM targeting sequence
  source 1..20: mol_type = other RNA
ttatttgtaatacaaacatt

SEQ ID NO: 21612 - RNA, 20 nt, synthetic construct
  misc_feature 1..20: note = C9Orf72 CTCN PAM targeting sequence
  source 1..20: mol_type = other RNA
tttctgcagaagaactttga

SEQ ID NO: 21613 - RNA, 20 nt, synthetic construct
  misc_feature 1..20: note = C9Orf72 CTCN PAM targeting sequence
  source 1..20: mol_type = other RNA
ggcagtagtgatatggaagg

SEQ ID NO: 21614 - RNA, 20 nt, synthetic construct
  misc_feature 1..20: note = C9Orf72 CTCN PAM targeting sequence
  source 1..20: mol_type = other RNA
ccttccatatcactactgcc

SEQ ID NO: 21615 - RNA, 20 nt, synthetic construct
  misc_feature 1..20: note = C9Orf72 CTCN PAM targeting sequence
  source 1..20: mol_type = other RNA
agatatgctgcaatgtcttt

SEQ ID NO: 21616 - RNA, 20 nt, synthetic construct
  misc_feature 1..20: note = C9Orf72 CTCN PAM targeting sequence
  source 1..20: mol_type = other RNA
cagtttcctgaaatataggc

SEQ ID NO: 21617 - RNA, 20 nt, synthetic construct
  misc_feature 1..20: note = C9Orf72 CTCN PAM targeting sequence
  source 1..20: mol_type = other RNA
ggtatttatttaaaaggcgt

SEQ ID NO: 21618 - RNA, 20 nt, synthetic construct
  misc_feature 1..20: note = C9Orf72 CTCN PAM targeting sequence
  source 1..20: mol_type = other RNA
gcatttcactctggtattta

SEQ ID NO: 21619 - RNA, 20 nt, synthetic construct
  misc_feature 1..20: note = C9Orf72 CTCN PAM targeting sequence
  source 1..20: mol_type = other RNA
ttcactgtgtttcctttgtc

SEQ ID NO: 21620 - RNA, 20 nt, synthetic construct
  misc_feature 1..20: note = C9Orf72 CTCN PAM targeting sequence
  source 1..20: mol_type = other RNA
gtcatttcctgaaagacgta

SEQ ID NO: 21621 - RNA, 20 nt, synthetic construct
  misc_feature 1..20: note = C9Orf72 CTCN PAM targeting sequence
  source 1..20: mol_type = other RNA
agacagggaatccaattggt

SEQ ID NO: 21622 - RNA, 20 nt, synthetic construct
  misc_feature 1..20: note = C9Orf72 CTCN PAM targeting sequence
  source 1..20: mol_type = other RNA
ttagaaaatagttgtttaaa

SEQ ID NO: 21623 - RNA, 20 nt, synthetic construct
  misc_feature 1..20: note = C9Orf72 CTCN PAM targeting sequence
  source 1..20: mol_type = other RNA
aagctgatagctggctttca

SEQ ID NO: 21624 - RNA, 20 nt, synthetic construct
  misc_feature 1..20: note = C9Orf72 CTCN PAM targeting sequence
  source 1..20: mol_type = other RNA
tcagggtgtaaatgggcttc

SEQ ID NO: 21625 - RNA, 20 nt, synthetic construct
  misc_feature 1..20: note = C9Orf72 CTCN PAM targeting sequence
  source 1..20: mol_type = other RNA
aattcatactagggctgtta

SEQ ID NO: 21626 - RNA, 20 nt, synthetic construct
  misc_feature 1..20: note = C9Orf72 CTCN PAM targeting sequence
  source 1..20: mol_type = other RNA
ttcttgacattattttcaaa

SEQ ID NO: 21627 - RNA, 20 nt, synthetic construct
  misc_feature 1..20: note = C9Orf72 CTCN PAM targeting sequence
  source 1..20: mol_type = other RNA
gttctacatattatttcatg

SEQ ID NO: 21628 - RNA, 20 nt, synthetic construct
  misc_feature 1..20: note = C9Orf72 CTCN PAM targeting sequence
  source 1..20: mol_type = other RNA
aatagaaaactgtgaccttt

SEQ ID NO: 21629 - RNA, 20 nt, synthetic construct
  misc_feature 1..20: note = C9Orf72 CTCN PAM targeting sequence
  source 1..20: mol_type = other RNA
ctaatagaaaactgtgacct

SEQ ID NO: 21630 - RNA, 20 nt, synthetic construct
  misc_feature 1..20: note = C9Orf72 CTCN PAM targeting sequence
  source 1..20: mol_type = other RNA
tataaaagctgatagtatct

SEQ ID NO: 21631 - RNA, 20 nt, synthetic construct
  misc_feature 1..20: note = C9Orf72 CTCN PAM targeting sequence
  source 1..20: mol_type = other RNA
taaatccagatttaaatatt

SEQ ID NO: 21632 - RNA, 20 nt, synthetic construct
  misc_feature 1..20: note = C9Orf72 CTCN PAM targeting sequence
  source 1..20: mol_type = other RNA
agttataaatataagactgc

SEQ ID NO: 21633 - RNA, 20 nt, synthetic construct
  misc_feature 1..20: note = C9Orf72 CTCN PAM targeting sequence
  source 1..20: mol_type = other RNA
ttctgtatctttctatgctt

SEQ ID NO: 21634 - RNA, 20 nt, synthetic construct
  misc_feature 1..20: note = C9Orf72 CTCN PAM targeting sequence
  source 1..20: mol_type = other RNA
tttccatttgctaatacttt

SEQ ID NO: 21635 - RNA, 20 nt, synthetic construct
  misc_feature 1..20: note = C9Orf72 CTCN PAM targeting sequence
  source 1..20: mol_type = other RNA
cacctgtaatcccagcactt

SEQ ID NO: 21636 - RNA, 20 nt, synthetic construct
  misc_feature 1..20: note = C9Orf72 CTCN PAM targeting sequence
  source 1..20: mol_type = other RNA
gtatgctgcgaatttatttc

SEQ ID NO: 21637 - RNA, 20 nt, synthetic construct
  misc_feature 1..20: note = C9Orf72 CTCN PAM targeting sequence
  source 1..20: mol_type = other RNA
ggaaataaattcgcagcata

SEQ ID NO: 21638 - RNA, 20 nt, synthetic construct
  misc_feature 1..20: note = C9Orf72 CTCN PAM targeting sequence
  source 1..20: mol_type = other RNA
cagaattaaaaaacgtctgg

SEQ ID NO: 21639 - RNA, 20 nt, synthetic construct
  misc_feature 1..20: note = C9Orf72 CTCN PAM targeting sequence
  source 1..20: mol_type = other RNA
aggggcttatacaaaaaaac

SEQ ID NO: 21640 - RNA, 20 nt, synthetic construct
  misc_feature 1..20: note = C9Orf72 CTCN PAM targeting sequence
  source 1..20: mol_type = other RNA
ctatgaactgactctcacgc

SEQ ID NO: 21641 - RNA, 20 nt, synthetic construct
  misc_feature 1..20: note = C9Orf72 CTCN PAM targeting sequence
  source 1..20: mol_type = other RNA
cacgcaattgtaaacttgct

SEQ ID NO: 21642 - RNA, 20 nt, synthetic construct
  misc_feature 1..20: note = C9Orf72 CTCN PAM targeting sequence
  source 1..20: mol_type = other RNA
cgcaattgtaaacttgctgg

SEQ ID NO: 21643 - RNA, 20 nt, synthetic construct
  misc_feature 1..20: note = C9Orf72 CTCN PAM targeting sequence
  source 1..20: mol_type = other RNA
gtcattttcttatgcaataa

SEQ ID NO: 21644 - RNA, 20 nt, synthetic construct
  misc_feature 1..20: note = C9Orf72 CTCN PAM targeting sequence
  source 1..20: mol_type = other RNA
gctcagtcattttcttatgc

SEQ ID NO: 21645 - RNA, 20 nt, synthetic construct
  misc_feature 1..20: note = C9Orf72 CTCN PAM targeting sequence
  source 1..20: mol_type = other RNA
ctggtctctgctcagtcatt

SEQ ID NO: 21646 - RNA, 20 nt, synthetic construct
  misc_feature 1..20: note = C9Orf72 CTCN PAM targeting sequence
  source 1..20: mol_type = other RNA
aatctgctttgacatcatgg

SEQ ID NO: 21647 - RNA, 20 nt, synthetic construct
  misc_feature 1..20: note = C9Orf72 CTCN PAM targeting sequence
  source 1..20: mol_type = other RNA
atattttctgatgacattaa

SEQ ID NO: 21648 - RNA, 20 nt, synthetic construct
  misc_feature 1..20: note = C9Orf72 CTCN PAM targeting sequence
  source 1..20: mol_type = other RNA
tttctgttgacttgtacatt

SEQ ID NO: 21649 - RNA, 20 nt, synthetic construct
  misc_feature 1..20: note = C9Orf72 CTCN PAM targeting sequence
  source 1..20: mol_type = other RNA
gtgtctgtcagagatcaaaa

SEQ ID NO: 21650 - RNA, 20 nt, synthetic construct
  misc_feature 1..20: note = C9Orf72 CTCN PAM targeting sequence
  source 1..20: mol_type = other RNA
gacagacacagagtacttta

SEQ ID NO: 21651 - RNA, 20 nt, synthetic construct
  misc_feature 1..20: note = C9Orf72 CTCN PAM targeting sequence
  source 1..20: mol_type = other RNA
atcttaaagtcttcacctta

SEQ ID NO: 21652 - RNA, 20 nt, synthetic construct
  misc_feature 1..20: note = C9Orf72 CTCN PAM targeting sequence
  source 1..20: mol_type = other RNA
ctatcttaaagtcttcacct

SEQ ID NO: 21653 - RNA, 20 nt, synthetic construct
  misc_feature 1..20: note = C9Orf72 CTCN PAM targeting sequence
  source 1..20: mol_type = other RNA
ggacctgtatcctttcttat

SEQ ID NO: 21654 - RNA, 20 nt, synthetic construct
  misc_feature 1..20: note = C9Orf72 CTCN PAM targeting sequence
  source 1..20: mol_type = other RNA
gcttagggtcatctcacaat

SEQ ID NO: 21655 - RNA, 20 nt, synthetic construct
  misc_feature 1..20: note = C9Orf72 CTCN PAM targeting sequence
  source 1..20: mol_type = other RNA
gtagacttactttgtatata

SEQ ID NO: 21656 - RNA, 20 nt, synthetic construct
  misc_feature 1..20: note = C9Orf72 CTCN PAM targeting sequence
  source 1..20: mol_type = other RNA
tctggtttaagtcacccata

SEQ ID NO: 21657 - RNA, 20 nt, synthetic construct
  misc_feature 1..20: note = C9Orf72 CTCN PAM targeting sequence
  source 1..20: mol_type = other RNA
ggaaaataattgattatatt

SEQ ID NO: 21658 - RNA, 20 nt, synthetic construct
  misc_feature 1..20: note = C9Orf72 CTCN PAM targeting sequence
  source 1..20: mol_type = other RNA
ttcccaccgtcattctttct

SEQ ID NO: 21659 - RNA, 20 nt, synthetic construct
  misc_feature 1..20: note = C9Orf72 CTCN PAM targeting sequence
  source 1..20: mol_type = other RNA
ttctccttaagcaattgatt

SEQ ID NO: 21660 - RNA, 20 nt, synthetic construct
  misc_feature 1..20: note = C9Orf72 CTCN PAM targeting sequence
  source 1..20: mol_type = other RNA
ttaagcaattgatttttagt

SEQ ID NO: 21661 - RNA, 20 nt, synthetic construct
  misc_feature 1..20: note = C9Orf72 CTCN PAM targeting sequence
  source 1..20: mol_type = other RNA
tatgataaatttcagttttc

SEQ ID NO: 21662 - RNA, 20 nt, synthetic construct
  misc_feature 1..20: note = C9Orf72 CTCN PAM targeting sequence
  source 1..20: mol_type = other RNA
aacactgcttactcaataga

SEQ ID NO: 21663 - RNA, 20 nt, synthetic construct
  misc_feature 1..20: note = C9Orf72 CTCN PAM targeting sequence
  source 1..20: mol_type = other RNA
atagagaattgcctctcttt

SEQ ID NO: 21664 - RNA, 20 nt, synthetic construct
  misc_feature 1..20: note = C9Orf72 CTCN PAM targeting sequence
  source 1..20: mol_type = other RNA
attgagtaagcagtgttgga

SEQ ID NO: 21665 - RNA, 20 nt, synthetic construct
  misc_feature 1..20: note = C9Orf72 CTCN PAM targeting sequence
  source 1..20: mol_type = other RNA
ctttggtccactttagcaca

SEQ ID NO: 21666 - RNA, 20 nt, synthetic construct
  misc_feature 1..20: note = C9Orf72 CTCN PAM targeting sequence
  source 1..20: mol_type = other RNA
ttggtccactttagcacaga

SEQ ID NO: 21667 - RNA, 20 nt, synthetic construct
  misc_feature 1..20: note = C9Orf72 CTCN PAM targeting sequence
  source 1..20: mol_type = other RNA
gtgctaaagtggaccaaaga

SEQ ID NO: 21668 - RNA, 20 nt, synthetic construct
  misc_feature 1..20: note = C9Orf72 CTCN PAM targeting sequence
  source 1..20: mol_type = other RNA
ctgtgctaaagtggaccaaa

SEQ ID NO: 21669 - RNA, 20 nt, synthetic construct
  misc_feature 1..20: note = C9Orf72 CTCN PAM targeting sequence
  source 1..20: mol_type = other RNA
ttttttcacccagagatttg

SEQ ID NO: 21670 - RNA, 20 nt, synthetic construct
  misc_feature 1..20: note = C9Orf72 CTCN PAM targeting sequence
  source 1..20: mol_type = other RNA
gggtgaaaaaatgagttaat

SEQ ID NO: 21671 - RNA, 20 nt, synthetic construct
  misc_feature 1..20: note = C9Orf72 CTCN PAM targeting sequence
  source 1..20: mol_type = other RNA
agaagcaaatctctgggtga

SEQ ID NO: 21672 - RNA, 20 nt, synthetic construct
  misc_feature 1..20: note = C9Orf72 CTCN PAM targeting sequence
  source 1..20: mol_type = other RNA
cattcttcccatctaactcc

SEQ ID NO: 21673 - RNA, 20 nt, synthetic construct
  misc_feature 1..20: note = C9Orf72 CTCN PAM targeting sequence
  source 1..20: mol_type = other RNA
gctgtaaactcacattcttc

SEQ ID NO: 21674 - RNA, 20 nt, synthetic construct
  misc_feature 1..20: note = C9Orf72 CTCN PAM targeting sequence
  source 1..20: mol_type = other RNA
tagccctagttaactcagct

SEQ ID NO: 21675 - RNA, 20 nt, synthetic construct
  misc_feature 1..20: note = C9Orf72 CTCN PAM targeting sequence
  source 1..20: mol_type = other RNA
catagccctagttaactcag

SEQ ID NO: 21676 - RNA, 20 nt, synthetic construct
  misc_feature 1..20: note = C9Orf72 CTCN PAM targeting sequence
  source 1..20: mol_type = other RNA
agatattttttcgaattcac

SEQ ID NO: 21677 - RNA, 20 nt, synthetic construct
  misc_feature 1..20: note = C9Orf72 CTCN PAM targeting sequence
  source 1..20: mol_type = other RNA
taacactaaccattttgggg

SEQ ID NO: 21678 - RNA, 20 nt, synthetic construct
  misc_feature 1..20: note = C9Orf72 CTCN PAM targeting sequence
  source 1..20: mol_type = other RNA
gctttagagtcacagatgtg

SEQ ID NO: 21679 - RNA, 20 nt, synthetic construct
  misc_feature 1..20: note = C9Orf72 CTCN PAM targeting sequence
  source 1..20: mol_type = other RNA
aaagctgaggaaaagtgtag

SEQ ID NO: 21680 - RNA, 20 nt, synthetic construct
  misc_feature 1..20: note = C9Orf72 CTCN PAM targeting sequence
  source 1..20: mol_type = other RNA
acatcacacaggccactaag

SEQ ID NO: 21681 - RNA, 20 nt, synthetic construct
  misc_feature 1..20: note = C9Orf72 CTCN PAM targeting sequence
  source 1..20: mol_type = other RNA
ctcaacatcacacaggccac

SEQ ID NO: 21682 - RNA, 20 nt, synthetic construct
  misc_feature 1..20: note = C9Orf72 CTCN PAM targeting sequence
  source 1..20: mol_type = other RNA
aattttccattttctcatct

SEQ ID NO: 21683 - RNA, 20 nt, synthetic construct
  misc_feature 1..20: note = C9Orf72 CTCN PAM targeting sequence
  source 1..20: mol_type = other RNA
tctttaccatggagataata

SEQ ID NO: 21684 - RNA, 20 nt, synthetic construct
  misc_feature 1..20: note = C9Orf72 CTCN PAM targeting sequence
  source 1..20: mol_type = other RNA
atggtaaagatgagaaaatg

SEQ ID NO: 21685 - RNA, 20 nt, synthetic construct
  misc_feature 1..20: note = C9Orf72 CTCN PAM targeting sequence
  source 1..20: mol_type = other RNA
gaccatttctccccctaagc

SEQ ID NO: 21686 - RNA, 20 nt, synthetic construct
  misc_feature 1..20: note = C9Orf72 CTCN PAM targeting sequence
  source 1..20: mol_type = other RNA
ccctaagcatggttaagagt

SEQ ID NO: 21687 - RNA, 20 nt, synthetic construct
  misc_feature 1..20: note = C9Orf72 CTCN PAM targeting sequence
  source 1..20: mol_type = other RNA
taaccatgcttagggggaga

SEQ ID NO: 21688 - RNA, 20 nt, synthetic construct
  misc_feature 1..20: note = C9Orf72 CTCN PAM targeting sequence
  source 1..20: mol_type = other RNA
acctctcaaaaagaataaga

SEQ ID NO: 21689 - RNA, 20 nt, synthetic construct
  misc_feature 1..20: note = C9Orf72 CTCN PAM targeting sequence
  source 1..20: mol_type = other RNA
caaaaagaataagatggtaa

SEQ ID NO: 21690 - RNA, 20 nt, synthetic construct
  misc_feature 1..20: note = C9Orf72 CTCN PAM targeting sequence
  source 1..20: mol_type = other RNA
atgtttcccctttattgccc

SEQ ID NO: 21691 - RNA, 20 nt, synthetic construct
  misc_feature 1..20: note = C9Orf72 CTCN PAM targeting sequence
  source 1..20: mol_type = other RNA
agaaataacgtcaaattcaa

SEQ ID NO: 21692 - RNA, 20 nt, synthetic construct
  misc_feature 1..20: note = C9Orf72 CTCN PAM targeting sequence
  source 1..20: mol_type = other RNA
gttgctcaagaaataacgtc

SEQ ID NO: 21693 - RNA, 20 nt, synthetic construct
  misc_feature 1..20: note = C9Orf72 CTCN PAM targeting sequence
  source 1..20: mol_type = other RNA
gggatccttggaaaatgtga

SEQ ID NO: 21694 - RNA, 20 nt, synthetic construct
  misc_feature 1..20: note = C9Orf72 CTCN PAM targeting sequence
  source 1..20: mol_type = other RNA
atttaagaaaatagttctgt

SEQ ID NO: 21695 - RNA, 20 nt, synthetic construct
  misc_feature 1..20: note = C9Orf72 CTCN PAM targeting sequence
  source 1..20: mol_type = other RNA
gtagaggatattatgctgat

SEQ ID NO: 21696 - RNA, 20 nt, synthetic construct
  misc_feature 1..20: note = C9Orf72 CTCN PAM targeting sequence
  source 1..20: mol_type = other RNA
actgagatgaagaacaaatt

SEQ ID NO: 21697 - RNA, 20 nt, synthetic construct
  misc_feature 1..20: note = C9Orf72 CTCN PAM targeting sequence
  source 1..20: mol_type = other RNA
gacaaactattatttagaag

SEQ ID NO: 21698 - RNA, 20 nt, synthetic construct
  misc_feature 1..20: note = C9Orf72 CTCN PAM targeting sequence
  source 1..20: mol_type = other RNA
ctttaaaatgcgaataaact

SEQ ID NO: 21699 - RNA, 20 nt, synthetic construct
  misc_feature 1..20: note = C9Orf72 CTCN PAM targeting sequence
  source 1..20: mol_type = other RNA
ttaaaatgcgaataaactca

SEQ ID NO: 21700 - RNA, 20 nt, synthetic construct
  misc_feature 1..20: note = C9Orf72 CTCN PAM targeting sequence
  source 1..20: mol_type = other RNA
ggtgagtttttcttagctgg

SEQ ID NO: 21701 - RNA, 20 nt, synthetic construct
  misc_feature 1..20: note = C9Orf72 CTCN PAM targeting sequence
  source 1..20: mol_type = other RNA
cctgagtttattcgcatttt

SEQ ID NO: 21702 - RNA, 20 nt, synthetic construct
  misc_feature 1..20: note = C9Orf72 CTCN PAM targeting sequence
  source 1..20: mol_type = other RNA
gttcaatacttctaatatga

SEQ ID NO: 21703 - RNA, 20 nt, synthetic construct
  misc_feature 1..20: note = C9Orf72 CTCN PAM targeting sequence
  source 1..20: mol_type = other RNA
cagttcaatacttctaatat

SEQ ID NO: 21704 - RNA, 20 nt, synthetic construct
  misc_feature 1..20: note = C9Orf72 CTCN PAM targeting sequence
  source 1..20: mol_type = other RNA
ctcacccgaaacacccagtg

SEQ ID NO: 21705 - RNA, 20 nt, synthetic construct
  misc_feature 1..20: note = C9Orf72 CTCN PAM targeting sequence
  source 1..20: mol_type = other RNA
cccgaaacacccagtgttct

SEQ ID NO: 21706 - RNA, 20 nt, synthetic construct
  misc_feature 1..20: note = C9Orf72 CTCN PAM targeting sequence
  source 1..20: mol_type = other RNA
atagttctgttgatgcgacc

SEQ ID NO: 21707 - RNA, 20 nt, synthetic construct
  misc_feature 1..20: note = C9Orf72 CTCN PAM targeting sequence
  source 1..20: mol_type = other RNA
ctgcttcctggcttccactg

SEQ ID NO: 21708 - RNA, 20 nt, synthetic construct
  misc_feature 1..20: note = C9Orf72 CTCN PAM targeting sequence
  source 1..20: mol_type = other RNA
agacttaacctagttgagat

SEQ ID NO: 21709 - RNA, 20 nt, synthetic construct
  misc_feature 1..20: note = C9Orf72 CTCN PAM targeting sequence
  source 1..20: mol_type = other RNA
aaaaaaaaaaaaaaaaaaaa

SEQ ID NO: 21710 - RNA, 20 nt, synthetic construct
  misc_feature 1..20: note = C9Orf72 CTCN PAM targeting sequence
  source 1..20: mol_type = other RNA
gcctcaaaaaaaaaaaaaaa

SEQ ID NO: 21711 - RNA, 20 nt, synthetic construct
  misc_feature 1..20: note = C9Orf72 CTCN PAM targeting sequence
  source 1..20: mol_type = other RNA
ctctgttgccaggccagagt

SEQ ID NO: 21712 - RNA, 20 nt, synthetic construct
  misc_feature 1..20: note = C9Orf72 CTCN PAM targeting sequence
  source 1..20: mol_type = other RNA
gttgccaggccagagtgcag

SEQ ID NO: 21713 - RNA, 20 nt, synthetic construct
  misc_feature 1..20: note = C9Orf72 CTCN PAM targeting sequence
  source 1..20: mol_type = other RNA
tcctcaattctccagaagaa

SEQ ID NO: 21714 - RNA, 20 nt, synthetic construct
  misc_feature 1..20: note = C9Orf72 CTCN PAM targeting sequence
  source 1..20: mol_type = other RNA
tcaattctccagaagaacat

SEQ ID NO: 21715 - RNA, 20 nt, synthetic construct
  misc_feature 1..20: note = C9Orf72 CTCN PAM targeting sequence
  source 1..20: mol_type = other RNA
attctccagaagaacatgcc

SEQ ID NO: 21716 - RNA, 20 nt, synthetic construct
  misc_feature 1..20: note = C9Orf72 CTCN PAM targeting sequence
  source 1..20: mol_type = other RNA
agaagaacatgccttctgat

SEQ ID NO: 21717 - RNA, 20 nt, synthetic construct
  misc_feature 1..20: note = C9Orf72 CTCN PAM targeting sequence
  source 1..20: mol_type = other RNA
cccctgacatcacccactcc

SEQ ID NO: 21718 - RNA, 20 nt, synthetic construct
  misc_feature 1..20: note = C9Orf72 CTCN PAM targeting sequence
  source 1..20: mol_type = other RNA
cctgacatcacccactcccg

SEQ ID NO: 21719 - RNA, 20 nt, synthetic construct
  misc_feature 1..20: note = C9Orf72 CTCN PAM targeting sequence
  source 1..20: mol_type = other RNA
cgcacacaccgccctcgcac

SEQ ID NO: 21720 - RNA, 20 nt, synthetic construct
  misc_feature 1..20: note = C9Orf72 CTCN PAM targeting sequence
  source 1..20: mol_type = other RNA
catcagagcaatcagcaagt

SEQ ID NO: 21721 - RNA, 20 nt, synthetic construct
  misc_feature 1..20: note = C9Orf72 CTCN PAM targeting sequence
  source 1..20: mol_type = other RNA
tcaaacaccaccccctcaga

SEQ ID NO: 21722 - RNA, 20 nt, synthetic construct
  misc_feature 1..20: note = C9Orf72 CTCN PAM targeting sequence
  source 1..20: mol_type = other RNA
gacaggcttccattcacatc

SEQ ID NO: 21723 - RNA, 20 nt, synthetic construct
  misc_feature 1..20: note = C9Orf72 CTCN PAM targeting sequence
  source 1..20: mol_type = other RNA
gcgaaaatgaatgtgcagct

SEQ ID NO: 21724 - RNA, 20 nt, synthetic construct
  misc_feature 1..20: note = C9Orf72 CTCN PAM targeting sequence
  source 1..20: mol_type = other RNA
ttttctgagtgtagaatctc

SEQ ID NO: 21725 - RNA, 20 nt, synthetic construct
  misc_feature 1..20: note = C9Orf72 CTCN PAM targeting sequence
  source 1..20: mol_type = other RNA
gaaaatgagtaacttcttat

SEQ ID NO: 21726 - RNA, 20 nt, synthetic construct
  misc_feature 1..20: note = C9Orf72 CTCN PAM targeting sequence
  source 1..20: mol_type = other RNA
gcctgggtgaccagtccggc

SEQ ID NO: 21727 - RNA, 20 nt, synthetic construct
  misc_feature 1..20: note = C9Orf72 CTCN PAM targeting sequence
  source 1..20: mol_type = other RNA
atgccaaggggaggtgtcat

SEQ ID NO: 21728 - RNA, 20 nt, synthetic construct
  misc_feature 1..20: note = C9Orf72 CTCN PAM targeting sequence
  source 1..20: mol_type = other RNA
gggacacaggggctagccac

SEQ ID NO: 21729 - RNA, 20 nt, synthetic construct
  misc_feature 1..20: note = C9Orf72 CTCN PAM targeting sequence
  source 1..20: mol_type = other RNA
taaaacaccacaaattgttt

SEQ ID NO: 21730 - RNA, 20 nt, synthetic construct
  misc_feature 1..20: note = C9Orf72 CTCN PAM targeting sequence
  source 1..20: mol_type = other RNA
aattgcttcacttttggcca

SEQ ID NO: 21731 - RNA, 20 nt, synthetic construct
  misc_feature 1..20: note = C9Orf72 CTCN PAM targeting sequence
  source 1..20: mol_type = other RNA
caatggccaaaagtgaagca

SEQ ID NO: 21732 - RNA, 20 nt, synthetic construct
  misc_feature 1..20: note = C9Orf72 CTCN PAM targeting sequence
  source 1..20: mol_type = other RNA
ttcaggtaggctcctgtgcc

SEQ ID NO: 21733 - RNA, 20 nt, synthetic construct
  misc_feature 1..20: note = C9Orf72 CTCN PAM targeting sequence
  source 1..20: mol_type = other RNA
aagagaagcaactaatacta

SEQ ID NO: 21734 - RNA, 20 nt, synthetic construct
  misc_feature 1..20: note = C9Orf72 CTCN PAM targeting sequence
  source 1..20: mol_type = other RNA
tggaggtatgggttagaaat

SEQ ID NO: 21735 - RNA, 20 nt, synthetic construct
  misc_feature 1..20: note = C9Orf72 CTCN PAM targeting sequence
  source 1..20: mol_type = other RNA
aatgattgtttgcacttttt

SEQ ID NO: 21736 - RNA, 20 nt, synthetic construct
  misc_feature 1..20: note = C9Orf72 CTCN PAM targeting sequence
  source 1..20: mol_type = other RNA
ttgaaggctcaaatgattgt

SEQ ID NO: 21737 - RNA, 20 nt, synthetic construct
  misc_feature 1..20: note = C9Orf72 CTCN PAM targeting sequence
  source 1..20: mol_type = other RNA
aactttggaagaagatctac

SEQ ID NO: 21738 - RNA, 20 nt, synthetic construct
  misc_feature 1..20: note = C9Orf72 CTCN PAM targeting sequence
  source 1..20: mol_type = other RNA
agaaaccactttctttgctc

SEQ ID NO: 21739 - RNA, 20 nt, synthetic construct
  misc_feature 1..20: note = C9Orf72 CTCN PAM targeting sequence
  source 1..20: mol_type = other RNA
ttcataagaagcagctcctc

SEQ ID NO: 21740 - RNA, 20 nt, synthetic construct
  misc_feature 1..20: note = C9Orf72 CTCN PAM targeting sequence
  source 1..20: mol_type = other RNA
tcatcaattaaggtttttat

SEQ ID NO: 21741 - RNA, 20 nt, synthetic construct
  misc_feature 1..20: note = C9Orf72 CTCN PAM targeting sequence
  source 1..20: mol_type = other RNA
tcaattaaggtttttatcat

SEQ ID NO: 21742 - RNA, 20 nt, synthetic construct
  misc_feature 1..20: note = C9Orf72 CTCN PAM targeting sequence
  source 1..20: mol_type = other RNA
agtaaatcatgaatgttcct

SEQ ID NO: 21743 - RNA, 20 nt, synthetic construct
  misc_feature 1..20: note = C9Orf72 CTCN PAM targeting sequence
  source 1..20: mol_type = other RNA
ttcaccttcatttttttttg

SEQ ID NO: 21744 - RNA, 20 nt, synthetic construct
  misc_feature 1..20: note = C9Orf72 CTCN PAM targeting sequence
  source 1..20: mol_type = other RNA
cttgaaatcaaaggttagaa

SEQ ID NO: 21745 - RNA, 20 nt, synthetic construct
  misc_feature 1..20: note = C9Orf72 CTCN PAM targeting sequence
  source 1..20: mol_type = other RNA
cacttgaaatcaaaggttag

SEQ ID NO: 21746 - RNA, 20 nt, synthetic construct
  misc_feature 1..20: note = C9Orf72 CTCN PAM targeting sequence
  source 1..20: mol_type = other RNA
tactttcacttgaagacaaa

SEQ ID NO: 21747 - RNA, 20 nt, synthetic construct
  misc_feature 1..20: note = C9Orf72 CTCN PAM targeting sequence
  source 1..20: mol_type = other RNA
ggaaataagaaggcctgagg

SEQ ID NO: 21748 - RNA, 20 nt, synthetic construct
  misc_feature 1..20: note = C9Orf72 CTCN PAM targeting sequence
  source 1..20: mol_type = other RNA
aaggaggtatgacagctatg

SEQ ID NO: 21749 - RNA, 20 nt, synthetic construct
  misc_feature 1..20: note = C9Orf72 CTCN PAM targeting sequence
  source 1..20: mol_type = other RNA
ttagagcatgtttatatctt

SEQ ID NO: 21750 - RNA, 20 nt, synthetic construct
  misc_feature 1..20: note = C9Orf72 CTCN PAM targeting sequence
  source 1..20: mol_type = other RNA
agattcaggtgctcagataa

SEQ ID NO: 21751 - RNA, 20 nt, synthetic construct
  misc_feature 1..20: note = C9Orf72 CTCN PAM targeting sequence
  source 1..20: mol_type = other RNA
gataattagacgaggtaagt

SEQ ID NO: 21752 - RNA, 20 nt, synthetic construct
  misc_feature 1..20: note = C9Orf72 CTCN PAM targeting sequence
  source 1..20: mol_type = other RNA
tctaattatctgagcacctg

SEQ ID NO: 21753 - RNA, 20 nt, synthetic construct
  misc_feature 1..20: note = C9Orf72 CTCN PAM targeting sequence
  source 1..20: mol_type = other RNA
ttcgaccatcattttgaaag

SEQ ID NO: 21754 - RNA, 20 nt, synthetic construct
  misc_feature 1..20: note = C9Orf72 CTCN PAM targeting sequence
  source 1..20: mol_type = other RNA
ctgttttagctatctaacta

SEQ ID NO: 21755 - RNA, 20 nt, synthetic construct
  misc_feature 1..20: note = C9Orf72 CTCN PAM targeting sequence
  source 1..20: mol_type = other RNA
gttttagctatctaactatt

SEQ ID NO: 21756 - RNA, 20 nt, synthetic construct
  misc_feature 1..20: note = C9Orf72 CTCN PAM targeting sequence
  source 1..20: mol_type = other RNA
aatgttcattctttaaggga

SEQ ID NO: 21757 - RNA, 20 nt, synthetic construct
  misc_feature 1..20: note = C9Orf72 CTCN PAM targeting sequence
  source 1..20: mol_type = other RNA
ggatgatggcaattccaaag

SEQ ID NO: 21758 - RNA, 20 nt, synthetic construct
  misc_feature 1..20: note = C9Orf72 CTCN PAM targeting sequence
  source 1..20: mol_type = other RNA
ttggaattgccatcatcccg

SEQ ID NO: 21759 - RNA, 20 nt, synthetic construct
  misc_feature 1..20: note = C9Orf72 CTCN PAM targeting sequence
  source 1..20: mol_type = other RNA
aaatcttgtgttggggagag

SEQ ID NO: 21760 - RNA, 20 nt, synthetic construct
  misc_feature 1..20: note = C9Orf72 CTCN PAM targeting sequence
  source 1..20: mol_type = other RNA
tctcagctgggtgccatggc

SEQ ID NO: 21761 - RNA, 20 nt, synthetic construct
  misc_feature 1..20: note = C9Orf72 CTCN PAM targeting sequence
  source 1..20: mol_type = other RNA
gctgggtgccatggctcatg

SEQ ID NO: 21762 - RNA, 20 nt, synthetic construct
  misc_feature 1..20: note = C9Orf72 CTCN PAM targeting sequence
  source 1..20: mol_type = other RNA
tgcccttaatcccagcaagg

SEQ ID NO: 21763 - RNA, 20 nt, synthetic construct
  misc_feature 1..20: note = C9Orf72 CTCN PAM targeting sequence
  source 1..20: mol_type = other RNA
atgttcaaggtttgaataaa

SEQ ID NO: 21764 - RNA, 20 nt, synthetic construct
  misc_feature 1..20: note = C9Orf72 CTCN PAM targeting sequence
  source 1..20: mol_type = other RNA
gaggggtgaatgtacttaag

SEQ ID NO: 21765 - RNA, 20 nt, synthetic construct
  misc_feature 1..20: note = C9Orf72 CTCN PAM targeting sequence
  source 1..20: mol_type = other RNA
gaggtttcctcgatgttcaa

SEQ ID NO: 21766 - RNA, 20 nt, synthetic construct
  misc_feature 1..20: note = C9Orf72 CTCN PAM targeting sequence
  source 1..20: mol_type = other RNA
caaaaacattatcaagcgtc

SEQ ID NO: 21767 - RNA, 20 nt, synthetic construct
  misc_feature 1..20: note = C9Orf72 CTCN PAM targeting sequence
  source 1..20: mol_type = other RNA
taacataaaactgaagcaag

SEQ ID NO: 21768 - RNA, 20 nt, synthetic construct
  misc_feature 1..20: note = C9Orf72 CTCN PAM targeting sequence
  source 1..20: mol_type = other RNA
aatttctcttaacataaaac

SEQ ID NO: 21769 - RNA, 20 nt, synthetic construct
  misc_feature 1..20: note = C9Orf72 CTCN PAM targeting sequence
  source 1..20: mol_type = other RNA
aaagaataaaggcgtacact

SEQ ID NO: 21770 - RNA, 20 nt, synthetic construct
  misc_feature 1..20: note = C9Orf72 CTCN PAM targeting sequence
  source 1..20: mol_type = other RNA
tatagcatgcattcttatcc

SEQ ID NO: 21771 - RNA, 20 nt, synthetic construct
  misc_feature 1..20: note = C9Orf72 CTCN PAM targeting sequence
  source 1..20: mol_type = other RNA
taattctcaataaaaagagt

SEQ ID NO: 21772 - RNA, 20 nt, synthetic construct
  misc_feature 1..20: note = C9Orf72 CTCN PAM targeting sequence
  source 1..20: mol_type = other RNA
ataaaaagagtgtaaaaaag

SEQ ID NO: 21773 - RNA, 20 nt, synthetic construct
  misc_feature 1..20: note = C9Orf72 CTCN PAM targeting sequence
  source 1..20: mol_type = other RNA
ttttattgagaattaagaga

SEQ ID NO: 21774 - RNA, 20 nt, synthetic construct
  misc_feature 1..20: note = C9Orf72 CTCN PAM targeting sequence
  source 1..20: mol_type = other RNA
tgacctggcagaataattat

SEQ ID NO: 21775 - RNA, 20 nt, synthetic construct
  misc_feature 1..20: note = C9Orf72 CTCN PAM targeting sequence
  source 1..20: mol_type = other RNA
tcactatcccaagtttattt

SEQ ID NO: 21776 - RNA, 20 nt, synthetic construct
  misc_feature 1..20: note = C9Orf72 CTCN PAM targeting sequence
  source 1..20: mol_type = other RNA
cctattttcctccttttgag

SEQ ID NO: 21777 - RNA, 20 nt, synthetic construct
  misc_feature 1..20: note = C9Orf72 CTCN PAM targeting sequence
  source 1..20: mol_type = other RNA
tattttcctccttttgagaa

SEQ ID NO: 21778 - RNA, 20 nt, synthetic construct
  misc_feature 1..20: note = C9Orf72 CTCN PAM targeting sequence
  source 1..20: mol_type = other RNA
ttttgagaaaactgtagaga

SEQ ID NO: 21779 - RNA, 20 nt, synthetic construct
  misc_feature 1..20: note = C9Orf72 CTCN PAM targeting sequence
  source 1..20: mol_type = other RNA
aaaggaggaaaataggagag

SEQ ID NO: 21780 - RNA, 20 nt, synthetic construct
  misc_feature 1..20: note = C9Orf72 CTCN PAM targeting sequence
  source 1..20: mol_type = other RNA
acagttttctcaaaaggagg

SEQ ID NO: 21781 - RNA, 20 nt, synthetic construct
  misc_feature 1..20: note = C9Orf72 CTCN PAM targeting sequence
  source 1..20: mol_type = other RNA
aatgtattggcctcatgtat

SEQ ID NO: 21782 - RNA, 20 nt, synthetic construct
  misc_feature 1..20: note = C9Orf72 CTCN PAM targeting sequence
  source 1..20: mol_type = other RNA
tgtattttctttcttccctt

SEQ ID NO: 21783 - RNA, 20 nt, synthetic construct
  misc_feature 1..20: note = C9Orf72 CTCN PAM targeting sequence
  source 1..20: mol_type = other RNA
tggctttttacaaaacgttg

SEQ ID NO: 21784 - RNA, 20 nt, synthetic construct
  misc_feature 1..20: note = C9Orf72 CTCN PAM targeting sequence
  source 1..20: mol_type = other RNA
gttttcagggcaaaggcctt

SEQ ID NO: 21785 - RNA, 20 nt, synthetic construct
  misc_feature 1..20: note = C9Orf72 CTCN PAM targeting sequence
  source 1..20: mol_type = other RNA
gcatgtttattgtggtcgga

SEQ ID NO: 21786 - RNA, 20 nt, synthetic construct
  misc_feature 1..20: note = C9Orf72 CTCN PAM targeting sequence
  source 1..20: mol_type = other RNA
gctataattattaggccaga

SEQ ID NO: 21787 - RNA, 20 nt, synthetic construct
  misc_feature 1..20: note = C9Orf72 CTCN PAM targeting sequence
  source 1..20: mol_type = other RNA
ggcctaataattatagcaga

SEQ ID NO: 21788 - RNA, 20 nt, synthetic construct
  misc_feature 1..20: note = C9Orf72 CTCN PAM targeting sequence
  source 1..20: mol_type = other RNA
gcactgagggggcaaaatgc

SEQ ID NO: 21789 - RNA, 20 nt, synthetic construct
  misc_feature 1..20: note = C9Orf72 CTCN PAM targeting sequence
  source 1..20: mol_type = other RNA
gtgcagagccagctactacc

SEQ ID NO: 21790 - RNA, 20 nt, synthetic construct
  misc_feature 1..20: note = C9Orf72 CTCN PAM targeting sequence
  source 1..20: mol_type = other RNA
tatgtgtccaacacccactt

SEQ ID NO: 21791 - RNA, 20 nt, synthetic construct
  misc_feature 1..20: note = C9Orf72 CTCN PAM targeting sequence
  source 1..20: mol_type = other RNA
aatacattttccccttgatg

SEQ ID NO: 21792 - RNA, 20 nt, synthetic construct
  misc_feature 1..20: note = C9Orf72 CTCN PAM targeting sequence
  source 1..20: mol_type = other RNA
tacttcttcctgtgcttata

SEQ ID NO: 21793 - RNA, 20 nt, synthetic construct
  misc_feature 1..20: note = C9Orf72 CTCN PAM targeting sequence
  source 1..20: mol_type = other RNA
aaatcaccttggataattgg

SEQ ID NO: 21794 - RNA, 20 nt, synthetic construct
  misc_feature 1..20: note = C9Orf72 CTCN PAM targeting sequence
  source 1..20: mol_type = other RNA
accccataagccaattatcc

SEQ ID NO: 21795 - RNA, 20 nt, synthetic construct
  misc_feature 1..20: note = C9Orf72 CTCN PAM targeting sequence
  source 1..20: mol_type = other RNA
gtctcctagtattaatgcta

SEQ ID NO: 21796 - RNA, 20 nt, synthetic construct
  misc_feature 1..20: note = C9Orf72 CTCN PAM targeting sequence
  source 1..20: mol_type = other RNA
tagtattaatgctatttctc

SEQ ID NO: 21797 - RNA, 20 nt, synthetic construct
  misc_feature 1..20: note = C9Orf72 CTCN PAM targeting sequence
  source 1..20: mol_type = other RNA
tcagagggtacatctgtcaa

SEQ ID NO: 21798 - RNA, 20 nt, synthetic construct
  misc_feature 1..20: note = C9Orf72 CTCN PAM targeting sequence
  source 1..20: mol_type = other RNA
gagggtacatctgtcaataa

SEQ ID NO: 21799 - RNA, 20 nt, synthetic construct
  misc_feature 1..20: note = C9Orf72 CTCN PAM targeting sequence
  source 1..20: mol_type = other RNA
gaggagaaatagcattaata

SEQ ID NO: 21800 - RNA, 20 nt, synthetic construct
  misc_feature 1..20: note = C9Orf72 CTCN PAM targeting sequence
  source 1..20: mol_type = other RNA
tttacccaagaaggcttcat

SEQ ID NO: 21801 - RNA, 20 nt, synthetic construct
  misc_feature 1..20: note = C9Orf72 CTCN PAM targeting sequence
  source 1..20: mol_type = other RNA
atgctgtgctaactgaacag

SEQ ID NO: 21802 - RNA, 20 nt, synthetic construct
  misc_feature 1..20: note = C9Orf72 CTCN PAM targeting sequence
  source 1..20: mol_type = other RNA
aacatttaacattttctgtt

SEQ ID NO: 21803 - RNA, 20 nt, synthetic construct
  misc_feature 1..20: note = C9Orf72 CTCN PAM targeting sequence
  source 1..20: mol_type = other RNA
ctcaaacatttaacattttc

SEQ ID NO: 21804 - RNA, 20 nt, synthetic construct
  misc_feature 1..20: note = C9Orf72 CTCN PAM targeting sequence
  source 1..20: mol_type = other RNA
caaatgctaacggcatgagc

SEQ ID NO: 21805 - RNA, 20 nt, synthetic construct
  misc_feature 1..20: note = C9Orf72 CTCN PAM targeting sequence
  source 1..20: mol_type = other RNA
aatgctaacggcatgagctg

SEQ ID NO: 21806 - RNA, 20 nt, synthetic construct
  misc_feature 1..20: note = C9Orf72 CTCN PAM targeting sequence
  source 1..20: mol_type = other RNA
tgccgttagcatttgagagc

SEQ ID NO: 21807 - RNA, 20 nt, synthetic construct
  misc_feature 1..20: note = C9Orf72 CTCN PAM targeting sequence
  source 1..20: mol_type = other RNA
gaggcaacaagaacacatct

SEQ ID NO: 21808 - RNA, 20 nt, synthetic construct
  misc_feature 1..20: note = C9Orf72 CTCN PAM targeting sequence
  source 1..20: mol_type = other RNA
gagggtataaatcccatttg

SEQ ID NO: 21809 - RNA, 20 nt, synthetic construct
  misc_feature 1..20: note = C9Orf72 CTCN PAM targeting sequence
  source 1..20: mol_type = other RNA
ggcaatttccttctggaaga

SEQ ID NO: 21810 - RNA, 20 nt, synthetic construct
  misc_feature 1..20: note = C9Orf72 CTCN PAM targeting sequence
  source 1..20: mol_type = other RNA
tctgtagaaattgtagtaac

SEQ ID NO: 21811 - RNA, 20 nt, synthetic construct
  misc_feature 1..20: note = C9Orf72 CTCN PAM targeting sequence
  source 1..20: mol_type = other RNA
gttccctcatctgtagaaat

SEQ ID NO: 21812 - RNA, 20 nt, synthetic construct
  misc_feature 1..20: note = C9Orf72 CTCN PAM targeting sequence
  source 1..20: mol_type = other RNA
gaaatgttgataacctcttc

SEQ ID NO: 21813 - RNA, 20 nt, synthetic construct
  misc_feature 1..20: note = C9Orf72 CTCN PAM targeting sequence
  source 1..20: mol_type = other RNA
tcaatgcactcagagagcaa

SEQ ID NO: 21814 - RNA, 20 nt, synthetic construct
  misc_feature 1..20: note = C9Orf72 CTCN PAM targeting sequence
  source 1..20: mol_type = other RNA
gagagcaagtggtagatttg

SEQ ID NO: 21815 - RNA, 20 nt, synthetic construct
  misc_feature 1..20: note = C9Orf72 CTCN PAM targeting sequence
  source 1..20: mol_type = other RNA
atgtatttggtattgagatt

SEQ ID NO: 21816 - RNA, 20 nt, synthetic construct
  misc_feature 1..20: note = C9Orf72 CTCN PAM targeting sequence
  source 1..20: mol_type = other RNA
ataccaaatacatagagatc

SEQ ID NO: 21817 - RNA, 20 nt, synthetic construct
  misc_feature 1..20: note = C9Orf72 CTCN PAM targeting sequence
  source 1..20: mol_type = other RNA
atctcaataccaaatacata

SEQ ID NO: 21818 - RNA, 20 nt, synthetic construct
  misc_feature 1..20: note = C9Orf72 CTCN PAM targeting sequence
  source 1..20: mol_type = other RNA
tctgggtctctcagctttgt

SEQ ID NO: 21819 - RNA, 20 nt, synthetic construct
  misc_feature 1..20: note = C9Orf72 CTCN PAM targeting sequence
  source 1..20: mol_type = other RNA
taaaaaatagaaaatgcagt

SEQ ID NO: 21820 - RNA, 20 nt, synthetic construct
  misc_feature 1..20: note = C9Orf72 CTCN PAM targeting sequence
  source 1..20: mol_type = other RNA
taacattttgtctttgaaat

SEQ ID NO: 21821 - RNA, 20 nt, synthetic construct
  misc_feature 1..20: note = C9Orf72 CTCN PAM targeting sequence
  source 1..20: mol_type = other RNA
actcttaacattttgtcttt

SEQ ID NO: 21822 - RNA, 20 nt, synthetic construct
  misc_feature 1..20: note = C9Orf72 CTCN PAM targeting sequence
  source 1..20: mol_type = other RNA
ttcagaataattattttaga

SEQ ID NO: 21823 - RNA, 20 nt, synthetic construct
  misc_feature 1..20: note = C9Orf72 CTCN PAM targeting sequence
  source 1..20: mol_type = other RNA
aaaataattattctgaatga

SEQ ID NO: 21824 - RNA, 20 nt, synthetic construct
  misc_feature 1..20: note = C9Orf72 CTCN PAM targeting sequence
  source 1..20: mol_type = other RNA
agggctgatattatgaactt

SEQ ID NO: 21825 - RNA, 20 nt, synthetic construct
  misc_feature 1..20: note = C9Orf72 CTCN PAM targeting sequence
  source 1..20: mol_type = other RNA
tttttgaactttctaatgaa

SEQ ID NO: 21826 - RNA, 20 nt, synthetic construct
  misc_feature 1..20: note = C9Orf72 CTCN PAM targeting sequence
  source 1..20: mol_type = other RNA
ttttttttcaatctctccta

SEQ ID NO: 21827 - RNA, 20 nt, synthetic construct
  misc_feature 1..20: note = C9Orf72 CTCN PAM targeting sequence
  source 1..20: mol_type = other RNA
cctaattgtcagggcaaata

SEQ ID NO: 21828 - RNA, 20 nt, synthetic construct
  misc_feature 1..20: note = C9Orf72 CTCN PAM targeting sequence
  source 1..20: mol_type = other RNA
taattgtcagggcaaatata

SEQ ID NO: 21829 - RNA, 20 nt, synthetic construct
  misc_feature 1..20: note = C9Orf72 CTCN PAM targeting sequence
  source 1..20: mol_type = other RNA
tgtcagcaatttcattcttt

SEQ ID NO: 21830 - RNA, 20 nt, synthetic construct
  misc_feature 1..20: note = C9Orf72 CTCN PAM targeting sequence
  source 1..20: mol_type = other RNA
tgccgattgagataaggagg

SEQ ID NO: 21831 - RNA, 20 nt, synthetic construct
  misc_feature 1..20: note = C9Orf72 CTCN PAM targeting sequence
  source 1..20: mol_type = other RNA
atcggcatgagtcaaacagt

SEQ ID NO: 21832 - RNA, 20 nt, synthetic construct
  misc_feature 1..20: note = C9Orf72 CTCN PAM targeting sequence
  source 1..20: mol_type = other RNA
gcaataaaaaggaatgagca

SEQ ID NO: 21833 - RNA, 20 nt, synthetic construct
  misc_feature 1..20: note = C9Orf72 CTCN PAM targeting sequence
  source 1..20: mol_type = other RNA
gtcacttctatatatacata

SEQ ID NO: 21834 - RNA, 20 nt, synthetic construct
  misc_feature 1..20: note = C9Orf72 CTCN PAM targeting sequence
  source 1..20: mol_type = other RNA
tagttcctagaaatgaaagg

SEQ ID NO: 21835 - RNA, 20 nt, synthetic construct
  misc_feature 1..20: note = C9Orf72 CTCN PAM targeting sequence
  source 1..20: mol_type = other RNA
tgtgaccctgtggcaagcca
